(19) United States
(12) Patent Application Publication
(10) Pub. No.: US 2021/0198305 A1
(43) Pub. Date: Jul. 1, 2021

(54) OLIGONUCLEOTIDE COMPOSITIONS AND METHODS OF USE THEREOF

(71) Applicants: WAVE LIFE SCIENCES LTD., Singapore (SG); Pfizer Inc., New York, NY (US)

(72) Inventors: Chandra Vargeese, Schwenksville, PA (US); Naoki Iwamoto, Brighton, MA (US); David Charles Donnell Butler, Medford, MA (US); Subramanian Marappan, Acton, MA (US); Genliang Lu, Winchester, MA (US); Jason Jingxin Zhang, Walpole, MA (US); Vinod Vathipadiekal, Stoneham, MA (US); Maria David Frank-Kamenetsky, Brookline, MA (US); Luciano Henrique Apponi, Chelsea, MA (US); Hanna Maria Wisniewska, Providence, RI (US); Xiayun Cheng, Old Saybrook, CT (US); Young Jin Cho, Belmont, MA (US)

(21) Appl. No.: 16/618,003

(22) PCT Filed: Jun. 1, 2018
(86) PCT No.: PCT/US18/35712

§ 371 Date: Nov. 27, 2019

Related U.S. Application Data
(60) Provisional application No. 62/670,702, filed on May 11, 2018.
(60) Provisional application No. 62/514,769, filed on Jun. 2, 2017.

(51) Int. Cl. C07H 17/04; C07H 19/04; C12N 15/113

(52) U.S. Cl. CPC C07H 17/04; C12N 2310/315; C12N 15/113; C07H 19/04

(57) ABSTRACT

Among other things, the present disclosure provides designed APOC3 oligonucleotides, compositions, and methods thereof. In some embodiments, provided oligonucleotide compositions provide improved single-stranded RNA interference and/or RNase H-mediated knockdown. Among other things, the present disclosure encompasses the recognition that structural elements of oligonucleotides, such as base sequence, chemical modifications (e.g., modifications of sugar, base, and/or internucleotidic linkages) or patterns thereof, conjugation with additional chemical moieties, and/or stereochemistry [e.g., stereochemistry of backbone chiral centers (chiral internucleotidic linkages)], and/or patterns thereof, can have significant impact on oligonucleotide properties and activities, e.g., RNA interference (RNAi) activity, stability, delivery, etc. In some embodiments, the present disclosure provides methods for treatment of diseases using provided oligonucleotide compositions, for example, in RNA interference and/or RNase H-mediated knockdown.

### CROSS-REFERENCE TO RELATED APPLICATIONS

[0001] This application is a U.S. National Stage Application of International PCT Application No. PCT/US2018/035712, filed Jun. 1, 2018, which claims priority to United States Provisional Application Nos. 62/514,769, filed Jun. 2, 2017, and 62/670,702, filed May 11, 2018, the entirety of each of which is incorporated herein by reference.

### SEQUENCE LISTING

[0002] The instant application contains a Sequence Listing which has been submitted electronically in ASCII format and is hereby incorporated by reference in its entirety. Said ASCII copy, created on Nov. 27, 2019, is named SL.txt and is 590,014 bytes in size.

### BACKGROUND

[0003] Oligonucleotides which target APOC3 (APOC3 oligonucleotides) are useful in various applications, e.g., therapeutic applications. The use of naturally-occurring nucleic acids (e.g., unmodified DNA or RNA) can be limited, for example, by their susceptibility to endo- and exo-nucleases.

### SUMMARY

[0004] Among other things, the present disclosure encompasses the recognition that controlling structural elements of APOC3 oligonucleotides, such as chemical modifications (e.g., modifications of a sugar, base and/or internucleotidic linkage) or patterns thereof, alterations in stereochemistry (e.g., stereochemistry of a backbone chiral internucleotidic linkage) or patterns thereof, and/or conjugation with an additional chemical moiety (e.g., a lipid moiety, a targeting moiety, carbohydrate moiety, a moiety that binds to a asialoglycoprotein receptor or ASGPR, e.g., a GalNAc moiety, etc.) can have a significant impact on APOC3 oligonucleotide properties and/or activities. In some embodiments, the properties and/or activities include, but are not limited to, participation in, direction of a decrease in expression, activity or level of an APOC3 gene or a gene product thereof, mediated, for example, by RNA interference (RNAi interference), single-stranded RNA interference (ssRNAi), RNase H-mediated knockdown, steric hindrance of translation, etc.

[0005] It is to be understood that both the foregoing general description and the following detailed description are exemplary and explanatory only and are not restrictive of the invention, as claimed.

### DETAILED DESCRIPTION OF THE INVENTION

[0006] The present invention may be understood more readily by reference to the following detailed description of exemplary embodiments of the invention and the examples included therein.

[0007] It is to be understood that this invention is not limited to specific synthetic methods of making that may of course vary. It is also to be understood that the terminology used herein is for the purpose of describing particular embodiments only and is not intended to be limiting.

[0008] In some embodiments, the present disclosure encompasses the recognition that stereochemistry, particularly stereochemistry of backbone chiral centers, can unexpectedly improve properties of APOC3 oligonucleotides. In contrast to many prior observations that some structural elements that increase stability can also lower activity, for example, RNA interference, the present disclosure demonstrates that control of stereochemistry can, surprisingly, increase stability while not significantly decreasing activity.

[0009] In some embodiments, the present disclosure provides oligonucleotides having certain 5′-end structures.

[0010] In some embodiments, the present disclosure provides 5′-end structures that, when used in accordance with the present disclosure, can provided oligonucleotides with high biological activities, e.g., RNAi activity.

[0011] In some embodiments, the present disclosure encompasses the recognition that various additional chemical moieties, such as lipid moieties and/or carbohydrate moieties, when incorporated into oligonucleotides, can improve one or more APOC3 oligonucleotide properties, such as knock down of the APOC3 target gene or a gene product thereof. In some embodiments, an additional chemical moiety is optional. In some embodiments, an APOC3 oligonucleotide can comprise more than one additional chemical moiety. In some embodiments, an APOC3 oligonucleotide can comprise two or more additional chemical moieties, wherein the additional chemical moieties are identical or non-identical, or of the same category (e.g., targeting moiety, carbohydrate moiety, a moiety that binds to ASPGR, lipid moiety, etc.) or not of the same category. In some embodiments, certain additional chemical moieties facilitate delivery of oligonucleotides to desired cells, tissues and/or organs. In some embodiments, certain additional chemical moieties facilitate internalization of oligonucleotides and/or increase oligonucleotide stability.

[0012] In some embodiments, the present disclosure demonstrates that certain provided structural elements, technologies and/or features are particularly useful for APOC3 oligonucleotides that participate in and/or direct RNAi mechanisms (e.g., RNAi agents). Regardless, however, the teachings of the present disclosure are not limited to oligonucleotides that participate in or operate via any particular mechanism. In some embodiments, the present disclosure pertains to any oligonucleotide which operates through any mechanism, and which comprises any sequence, structure or format (or portion thereof) described herein. In some embodiments, the present disclosure provides an APOC3 oligonucleotide which operates through any mechanism, and which comprises any sequence, structure or format (or portion thereof) described herein, including, but not limited to, any 5′-end structure; 5′-end region; a first region (including but not limited to, a seed region); a second region (including, but not limited to, a post-seed region); and a 3′-end region (which can be a 3′-terminal dinucleotide and/or a 3′-end cap); an optional additional chemical moiety (including but not limited to a targeting moiety, a carbohydrate moiety, a moiety that binds APGR, and a lipid moiety); stereochemistry or patterns of stereochemistry; modification or pattern of modification; internucleotidic linkage or pattern of internucleotidic linkages; modification of sugar(s) or pattern of modifications of sugars; modification of base(s) or patterns of modifications of bases. In some embodiments, provided oligonucleotides may participate in (e.g., direct) RNAi mechanisms. In some embodiments, provided oligonucleotides may participate in RNase H (ribonuclease H) mechanisms. In some embodiments, provided oligonucleotides may act as translational inhibitors (e.g., may provide steric blocks of translation). In some embodiments, provided oligonucleotides may be therapeutic.

[0013] In some embodiments, an APOC3 target sequence is a sequence to which an APOC3 oligonucleotide as described herein binds. In many embodiments, a target sequence is identical to, or is an exact complement of, a sequence of a provided oligonucleotide, or of consecutive residues therein (e.g., a provided oligonucleotide includes a target-binding sequence that is identical to, or an exact complement of, a target sequence). In some embodiments, a target-binding sequence is an exact complement of a target sequence of a transcript (e.g., pre-mRNA, mRNA, etc.). A target-binding sequence/target sequence can be of various lengths to provided oligonucleotides with desired activities and/or properties. In some embodiments, a target binding sequence/target sequence comprises 5-50 bases. In some embodiments, a small number of differences/mismatches is tolerated between (a relevant portion of) an APOC3 oligonucleotide and its target sequence, including but not limited to the 5′ and/or 3′-end regions of the target and/or oligonucleotide sequence. In many embodiments, a target sequence is present within a transcript (e.g., an mRNA and/or a pre-mRNA) produced from a target gene.

[0014] Unless otherwise noted, all sequences (including, but not limited to base sequences and patterns of chemistry, modification, and/or stereochemistry) are presented in 5′ to 3′ order.

[0015] In some embodiments, the present disclosure provides compositions and methods related to an APOC3 oligonucleotide which is specific to a target and which has or comprises the base sequence of any oligonucleotide disclosed herein, or a region of at least 15 contiguous nucleotides of the base sequence of any oligonucleotide disclosed herein, wherein the first nucleotide of the base sequence or the first nucleotide of the at least 15 contiguous nucleotides can be optionally replaced by T or DNA T. In some embodiments, the oligonucleotide is capable of directing ssRNAi.

[0016] In some embodiments, the present disclosure provides an APOC3 oligonucleotide composition comprising a first plurality of oligonucleotides which have a common base sequence and comprise one or more internucleotidic linkage, sugar, and/or base modifications.

[0017] In some embodiments, a nucleotide is a natural nucleotide. In some embodiments, a nucleotide is a modified nucleotide. In some embodiments, a nucleotide is a nucleotide analog. In some embodiments, a base is a modified base. In some embodiments, a base is protected nucleobase, such as a protected nucleobase used in oligonucleotide synthesis. In some embodiments, a base is a base analog. In some embodiments, a sugar is a modified sugar. In some embodiments, a sugar is a sugar analog. In some embodiments, an internucleotidic linkage is a modified internucleotidic linkage. In some embodiments, a nucleotide comprises a base, a sugar, and an internucleotidic linkage, wherein each of the base, the sugar, and the internucleotidic linkage is independently and optionally naturally-occurring or non-naturally occurring. In some embodiments, a nucleoside comprises a base and a sugar, wherein each of the base and the sugar is independently and optionally naturally-occurring or non-naturally occurring. Non-limiting examples of nucleotides include DNA (2′-deoxy) and RNA (2′-OH) nucleotides; and those which comprise one or more modifications at the base, sugar and/or internucleotidic linkage. Non-limiting examples of sugars include ribose and deoxyribose; and ribose and deoxyribose with 2′-modifications, including but not limited to 2′-F, LNA, 2′-OMe, and 2′-MOE modifications. In some embodiments, an internucleotidic linkage can have a structure of Formula I as described in the present disclosure. In some embodiments, an internucleotidic linkage is a moiety which does not a comprise a phosphorus but serves to link two natural or non-natural sugars.

[0018] In some embodiments, the present disclosure provides a chirally controlled APOC3 oligonucleotide composition that directs a greater decrease of the expression, activity and/or level of an APOC3 gene or a gene product thereof, single-stranded RNA interference and/or RNase H-mediated knockdown, when compared to a reference condition, e.g., absence of the composition, or presence of a reference composition (e.g., a stereorandom composition of oligonucleotides having the same base sequence and chemical modifications).

[0019] In some embodiments, an APOC3 oligonucleotide composition comprising a plurality of oligonucleotides is stereorandom in that oligonucleotides of the plurality do not share a common stereochemistry at any chiral internucleotidic linkage. In some embodiments, an APOC3 oligonucleotide composition comprising a plurality of oligonucleotides is chirally controlled in that oligonucleotides of the plurality share a common stereochemistry at one or more chiral internucleotidic linkages. In some embodiments, an APOC3 oligonucleotide composition comprising a first plurality of oligonucleotides which is chirally controlled has a decreased susceptibility to endo- and exo-nucleases relative to an APOC3 oligonucleotide composition comprising a first plurality of oligonucleotides which is stereorandom.

[0020] In some embodiments, a composition comprises a multimer of two or more of any: APOC3 oligonucleotides of a first plurality and/or oligonucleotides of a second plurality, wherein the oligonucleotides of the first and second plurality can independently direct knockdown of the same or different targets independently via RNA interference and/or RNase H-mediated knockdown.

[0021] In some embodiments, an APOC3 oligonucleotide composition comprising a plurality of oligonucleotides (e.g., a first plurality of oligonucleotides) is chirally controlled in that oligonucleotides of the plurality share a common stereochemistry independently at one or more chiral internucleotidic linkages. In some embodiments, oligonucleotides of the plurality share a common stereochemistry configuration at 1, 2, 3, 4, 5, 6, 7, 8, 9, 10, 11, 12, 13, 14, 15, 16, 17, 18, 19, 20, 21, 22, 23, 24, 25, 26, 27, 28, 29, 30, 35, 40, 45, 50 or more chiral internucleotidic linkages, each of which is independently Rp or Sp In some embodiments, oligonucleotides of the plurality share a common stereochemistry configuration at each chiral internucleotidic linkages. In some embodiments, a chiral internucleotidic linkage where a predetermined level of oligonucleotides of a composition share a common stereochemistry configuration (independently Rp or Sp) is referred to as a chirally controlled internucleotidic linkage.

[0022] In some embodiments, at least 5 internucleotidic linkages are chirally controlled; in some embodiments, at least 10 internucleotidic linkages are chirally controlled; in some embodiments, at least 15 internucleotidic linkages are chirally controlled; in some embodiments, each chiral internucleotidic linkage is chirally controlled.

[0023] In some embodiments, the present disclosure provides an APOC3 oligonucleotide composition comprising a first plurality of APOC3 oligonucleotides which share:

[0024] 1) a common base sequence;
[0025] 2) a common pattern of backbone linkages; and
[0026] 3) a common pattern of backbone chiral centers, which composition is a substantially pure preparation of a single oligonucleotide in that a predetermined level of the oligonucleotides in the composition have the common base sequence and length, the common pattern of backbone linkages, and the common pattern of backbone chiral centers.

[0027] In some embodiments, the common pattern of backbone chiral centers comprises at least one internucleotidic linkage comprising a chirally controlled chiral center.

[0028] In some embodiments, levels of oligonucleotides and/or diastereopurity can be determined by analytical methods, e.g., chromatographic, spectrometric, spectroscopic methods or any combinations thereof.

[0029] Among other things, the present disclosure encompasses the recognition that stereorandom APOC3 oligonucleotide preparations contain a plurality of distinct chemical entities that differ from one another, e.g., in the stereochemical structure (or stereochemistry) of individual backbone chiral centers within the oligonucleotide chain. Without control of stereochemistry of backbone chiral centers, stereorandom oligonucleotide preparations provide uncontrolled compositions comprising undetermined levels of oligonucleotide stereoisomers. Even though these stereoisomers may have the same base sequence and/or chemical modifications, they are different chemical entities at least due to their different backbone stereochemistry, and they can have, as demonstrated herein, different properties, e.g., sensitivity to nucleases, activities, distribution, etc. In some embodiments, a particular stereoisomer may be defined, for example, by its base sequence, its length, its pattern of backbone linkages, and its pattern of backbone chiral centers. In some embodiments, the present disclosure demonstrates that improvements in properties and activities achieved through control of stereochemistry within an APOC3 oligonucleotide can be comparable to, or even better than those achieved through use of chemical modification.

[0030] In some embodiments, an APOC3 oligonucleotide comprises, in 5′ to 3′ order, a 5′-end region, a seed region, a post-seed region, and a 3-end region, optionally further comprising an additional chemical moiety.

[0031] In some embodiments, a 5′-end region is the entire portion of an APOC3 oligonucleotide which is 5′ to the seed region. In some embodiments, a 3′-end region is the entire portion of an APOC3 oligonucleotide which is 3′ to the post-seed region.

[0032] In some embodiments, a 5′-end structure is a 5′-end group.

[0033] In some embodiments, a 5′-end structure comprises a 5′-end group.

[0034] In some embodiments, a provided oligonucleotide can comprise a 5′-end region, 5′-end structure, 5′-end group, 5′-end nucleoside, or 5′-end nucleotide described herein or known in the art.

[0035] In some embodiments, a 5′-end structure, a 5′-end region, 5′ nucleotide moiety, seed region, post-seed region, 3′-terminal dinucleotide and/or 3′-end cap independently have any structure described herein or known in the art. In some embodiments, any structure for a 5′-end described herein or known in the art and/or any structure for a 5′ nucleotide moiety described herein or known in the art and/or any structure for a seed region described herein or known in the art and/or any structure for a post-seed region described herein or known in the art and/or any structure for a 3′-terminal dinucleotide described herein or known in the art and/or any structure for a 3′-end cap described herein or known in the art can be combined.

[0036] In some embodiments, a provided oligonucleotide comprises one or more blocks. In some embodiments, a provided oligonucleotide comprise one or more blocks, wherein a block comprises one or more consecutive nucleosides, and/or nucleotides, and/or sugars, or bases, and/or internucleotidic linkages. In some embodiments, a block encompasses an entire seed region or a portion thereof. In some embodiments, a block encompasses an entire post-seed region or a portion thereof.

[0037] In some embodiments, provided oligonucleotides are blockmers.

[0038] In some embodiments, provided oligonucleotides are altmers comprising alternating blocks. In some embodiments, a blockmer or an altmer can be defined by chemical modifications (including presence or absence), e.g., base modifications, sugar modification, internucleotidic linkage modifications, stereochemistry, etc., or patterns thereof.

[0039] In some embodiments, provided oligonucleotides comprise one or more sugar modifications. In some embodiments, a sugar modification is at the 2′-position. In some embodiments, a sugar modification is selected from: 2′-F, 2′-OMe, and 2′-MOE. 2′-F is also designated 2′ Fluoro. 2′-OMe is also designated 2′-O-Methyl. 2′-MOE is also designated 2′-Methoxyethyl or MOE.

[0040] In some embodiments, an APOC3 oligonucleotide comprises only two 2′-F. In some embodiments, an APOC3 oligonucleotide comprises only two 2′-F, wherein the two nucleotides are at the 2nd and 14th positions.

[0041] In some embodiments, an APOC3 oligonucleotide comprises only two 2′-F, wherein the two nucleotides are at the 2nd and 14th positions, and wherein the first nucleotide is 2′-deoxy.

[0042] In some embodiments, an APOC3 oligonucleotide comprises only two 2′-F, wherein the two nucleotides are at the 2nd and 14th positions, and wherein the first nucleotide is 2′-deoxy T.

[0043] In some embodiments, an APOC3 oligonucleotide comprises only two 2′-F, wherein the two nucleotides are at the 2nd and 14th positions, and wherein the first nucleotide is 2′-deoxy, and the 5′-end structure is —OH.

[0044] In some embodiments, an APOC3 oligonucleotide comprises only two 2′-F, wherein the two nucleotides are at the 2nd and 14th positions, and wherein the first nucleotide is 2′-deoxy T, and the 5′-end structure is —OH.

[0045] In some embodiments herein, in reference to an APOC3 oligonucleotide, “first” (e.g., first nucleotide) refers to the 5′ end of the oligonucleotide, and “last” or “end” (e.g., last nucleotide or end nucleotide) refers to the 3′ end.

[0046] In some embodiments, provided oligonucleotides comprise sugars with a particular modification which alternate with sugars with no modification or a different modification. In some embodiments, sugars with a particular modification appear in one or more blocks.

[0047] In some embodiments, provided oligonucleotides comprise one or more blocks comprising sugars with a particular 2′ modification which alternate with sugars which independently have no modification or have a different modification. In some embodiments, provided oligonucleotides comprise one or more blocks comprising sugars with a 2′-F modification which alternate with sugars which independently have no modification or have a different modification. In some embodiments, provided oligonucleotides comprise one or more blocks comprising sugars with a 2′-OMe modification which alternate with sugars which independently have no modification or a different modification. In some embodiments, provided oligonucleotides one or more blocks comprising sugars with a 2′-OMe modification which alternate with sugars with a 2′-F modification.

[0048] In some embodiments, a block of sugars has or comprises a pattern of 2′-modifications of any of: ff, fffm, fffmm, fffmmm, fffmmmm, fffiummmm, fffmmmmmm, fffmmmmmmf, fffmmmmmmff, fffmmmmmmffm, fffmmmmmmffmm, fffmmmmmmffmmf, fffmmmmmmffmmfm, fffmmmmmmffmmfmf, fffmmmmmmffmmfmfm, fffmmmmmmffmmfmfmf, fffmmmmmmffmmfmfmfm, fffmmmmmmffmmfmfmfmm, fffmmmmmmffmmfmfmfmmm, ffmmffmm, ffmmmmmmffmmfmfmfmmm, fmfmfmfmfmfmfm, fmfmfmfmfmfmfmf, fmfmfmfmfmfmfmfm, fmfmfmfmfmfmfmfmf, fmfmfmfmfmfmfmfmfm, fmfmfmfmfmfmfmfmfmf, fmfmfmfmfmfmfmfmfmfm, fmfmfmfmfmfmfmfmfmfmm, fmfmfmfmfmfmfmfmfmm, fmfmfmfmfmfmfmfmm, fmfmfmfmfmfmfmm, fmfmfmfmfmfmmm, fmmffmm, fmmmmmmffmmfmfmfmmm, mff, mffm, mffmf, mffmff, mffmffm, mffmmffmm, mfmfm, mfmfmfmfmfffmfmfmfmmm, mfmfmfmfmfmfmfm, mfmfmfmfmfmfmfmfmm, mfmfmfmfmfmfmfmfmfmmm, mfmfmfmfmfmfmfmm, mfmfmfmfmfmfmfmm, mfmfmfmfmfmfmm, mfmfmfmfmfmfmmm, mfmfmfmfmfmmm, mfmfmfmfmfmmmfm, mfmfmfmfmfmmmmm, mfmfmfmfmmm, mfmfmfmfmmmfmfm, mfmfmfmfmmmfmmm, mfmfmfmfmmmmmfm, mfmfmfmmm, mfmfmfmmmfmfmfm, mfmfmfmmmfmfmmm, mfmfmfmmmfmmmfm, mfmfmfmmmmmfmfm, mfmfmmm, mfmfmmmfmfmfmfm, mfmfmmmfmfmfmmm, mfmfmmmfmfmmmfm, mfmfmmmfmmmfmfm, mfmfmmmmmfmfmfm, mfmmm, mfmmmfmfmfmfmfm, mfmmmfmfmfmfmmm, mfmmmfmfmfmmmfm, mfmmmfmfmmmfmfm, mfmmmfmmmfmfmfm, mfmmmfmmmfmfmfm, mfmmmmmfmfmfmfm, mmffm, mmffmm, mmffmm, mmffmmf, mmffmmff, mmffmmffm, mmffmmffmm, mmffmmfmfmfmmm, mmm, mmmffmmfmfmfmmm, mmmfmfmfmfmfmfm, mmmfmfmfmfmfmmm, mmmfmfmfmfmmmfm, mmmfmfmfmmmfmfm, mmmfmfmmmfmfmfm, mmmfmmmfmfmfmfm, mmmmffmmfmfmfmfmmm, mmm, mmmm, mmmmm, mmmmmffmmfmfmfmmm, mmmmmfmfmfmfmfm, mmmmmm, mmmmmmffmmfmfmfmmm, mfmf, mfmf, mfmfmf, fmfm, fmfmfm, fmfmfmf, dfdf, dfdfdf, dfdfdfdf, fdfd, fdfdfd, fdfdfdfd, dfdfmfmf, dfmfmf, mfdfmf, or dfmfdf, wherein m indicates a 2′-OMe, f indicates a 2′-F, and d indicates no substitution at 2′-position. In some embodiments, a seed region and/or post-seed region can comprise a block of sugar modifications.

[0049] In some embodiments, a block is a stereochemistry block. In some embodiments, a block is an Rp block in that each internucleotidic linkage of the block is Rp. In some embodiments, a seed region-block is an Rp block. In some embodiments, a post-seed region-block is an Rp block. In some embodiments, a block is an Sp block in that each internucleotidic linkage of the block is Sp. In some embodiments, a seed region-block is an Sp block. In some embodiments, a post-seed region-block is an Sp block. In some embodiments, provided oligonucleotides comprise both Rp and Sp blocks. In some embodiments, provided oligonucleotides comprise one or more Rp but no Sp blocks. In some embodiments, provided oligonucleotides comprise one or more Sp but no Rp blocks. In some embodiments, provided oligonucleotides comprise one or more PO blocks wherein each internucleotidic linkage of the block is a natural phosphate linkage.

[0050] In some embodiments, a seed region-block is an Sp block wherein each sugar moiety comprises a 2′-F modification. In some embodiments, a seed region-block is an Sp block wherein each of internucleotidic linkage is a modified internucleotidic linkage and each sugar moiety comprises a 2′-F modification. In some embodiments, a seed region-block is an Sp block wherein each of internucleotidic linkage is a phosphorothioate linkage and each sugar moiety comprises a 2′-F modification. In some embodiments, a seed region-block comprises 4 or more nucleoside units. In some embodiments, a nucleoside unit is a nucleoside. In some embodiments, a seed region-block comprises 5 or more nucleoside units. In some embodiments, a seed region-block comprises 6 or more nucleoside units. In some embodiments, a seed region-block comprises 7 or more nucleoside units. In some embodiments, a post-seed region-block is an Sp block wherein each sugar moiety comprises a 2′-F modification. In some embodiments, a post-seed region-block is an Sp block wherein each of internucleotidic linkage is a modified internucleotidic linkage and each sugar moiety comprises a 2′-F modification. In some embodiments, a post-seed region-block is an Sp block wherein each of internucleotidic linkage is a phosphorothioate linkage and each sugar moiety comprises a 2′-F modification. In some embodiments, a post-seed region-block comprises 4 or more nucleoside units. In some embodiments, a post-seed region-block comprises 5 or more nucleoside units. In some embodiments, a post-seed region-block comprises 6 or more nucleoside units. In some embodiments, a post-seed region-block comprises 7 or more nucleoside units. In some embodiments, a seed region and/or post-seed region can comprise a block. In some embodiments, a seed region and/or post-seed region comprises a stereochemistry block.

[0051] In some embodiments, the present disclosure provides an APOC3 oligonucleotide composition comprising a first plurality of oligonucleotides which:

[0052] 1) have a common base sequence; and

[0053] 2) comprise one or more modified sugar moieties and modified internucleotidic linkages.

[0054] In some embodiments, the present disclosure provides an APOC3 oligonucleotide composition comprising a first plurality of oligonucleotides capable of directing single-stranded RNA interference which:

[0055] 1) have a common base sequence complementary to a target sequence in a transcript; and

[0056] 2) comprise one or more modified sugar moieties and modified internucleotidic linkages.

[0057] In some embodiments, a reference condition is absence of the composition. In some embodiments, a reference condition is presence of a reference composition. Example reference compositions comprising a reference plurality of oligonucleotides are extensively described in this disclosure. In some embodiments, oligonucleotides of the reference plurality have a different structural elements (chemical modifications, stereochemistry, etc.) compared with oligonucleotides of the first plurality in a provided composition. In some embodiments, a provided oligonucleotide composition comprising a first plurality of oligonucleotide is chirally controlled in that the first plurality of oligonucleotides comprise one or more chirally controlled internucleotidic linkages. In some embodiments, a provided oligonucleotide composition comprising a first plurality of oligonucleotide is chirally controlled in that the first plurality of oligonucleotides comprise 1-20 chirally controlled internucleotidic linkages. In some embodiments, the first plurality of oligonucleotides comprise 2, 3, 4, 5, 6, 7, 8, 9, 10, 11, 12, 13, 14, or 15 chirally controlled internucleotidic linkages. In some embodiments, a reference composition is a stereorandom preparation of oligonucleotides having the same chemical modifications. In some embodiments, a reference composition is a mixture of stereoisomers while a provided composition is a single-stranded RNAi agent of one stereoisomer. In some embodiments, oligonucleotides of the reference plurality have the same base sequence as oligonucleotide of the first plurality in a provided composition. In some embodiments, oligonucleotides of the reference plurality have the same chemical modifications as oligonucleotide of the first plurality in a provided composition. In some embodiments, oligonucleotides of the reference plurality have the same sugar modifications as oligonucleotide of the first plurality in a provided composition. In some embodiments, oligonucleotides of the reference plurality have the same base modifications as oligonucleotide of the first plurality in a provided composition. In some embodiments, oligonucleotides of the reference plurality have the same internucleotidic linkage modifications as oligonucleotide of the first plurality in a provided composition. In some embodiments, oligonucleotides of the reference plurality have the same base sequence and the same chemical modifications as oligonucleotide of the first plurality in a provided composition. In some embodiments, oligonucleotides of the reference plurality have the same stereochemistry as oligonucleotide of the first plurality in a provided composition but different chemical modifications, e.g., base modification, sugar modification, internucleotidic linkage modifications, etc.

[0058] In some embodiments, the present disclosure provides a composition comprising an APOC3 oligonucleotide, wherein the oligonucleotide is complementary or substantially complementary to a target RNA sequence, has a length of about 15 to about 49 total nucleotides, wherein the oligonucleotide comprises at least one non-natural base, sugar and/or internucleotidic linkage.

[0059] In some embodiments, the present disclosure provides an APOC3 oligonucleotide composition comprising a single-stranded RNAi agent, wherein the single-stranded RNAi agent is complementary or substantially complementary to a target RNA sequence, has a length of about 15 to about 49 total nucleotides, and is capable of directing target-specific RNA interference, wherein the single-stranded RNAi agent comprises at least one non-natural base, sugar and/or internucleotidic linkage.

[0060] In some embodiments, the length is 15 to 49, about 17 to about 49, 17 to 49, about 19 to about 29, 19 to 29, about 19 to about 25, 19 to 25, about 19 to about 23, or 19 to 23 total nucleotides.

[0061] In some embodiments, the present disclosure provides an APOC3 oligonucleotide composition comprising a first plurality of oligonucleotides which:

[0062] 1) have a common base sequence complementary or substantially complementary to a target sequence in a transcript; and

[0063] 2) comprise one or more modified sugar moieties and modified internucleotidic linkages,

[0064] the oligonucleotide composition being characterized in that, when it is contacted with the transcript, knockdown of the transcript is improved relative to that observed under reference conditions selected from the group consisting of absence of the composition, presence of a reference composition, and combinations thereof.

[0065] In some embodiments, the present disclosure provides an APOC3 oligonucleotide composition comprising a first plurality of oligonucleotides capable of directing single-stranded RNA interference which:

[0066] 1) have a common base sequence complementary to a target sequence in a transcript; and

[0067] 2) comprise one or more modified sugar moieties and modified internucleotidic linkages,

[0068] the oligonucleotide composition being characterized in that, when it is contacted with the transcript in a RNA interference system, RNAi-mediated knockdown of the transcript is improved relative to that observed under reference conditions selected from the group consisting of absence of the composition, presence of a reference composition, and combinations thereof.

[0069] In some embodiments, the present disclosure provides an APOC3 oligonucleotide composition comprising a first plurality of oligonucleotides, wherein oligonucleotides of the first plurality are of a particular oligonucleotide type defined by:

[0070] 1) base sequence;

[0071] 2) pattern of backbone linkages;

[0072] 3) pattern of backbone chiral centers; and

[0073] 4) pattern of backbone phosphorus modifications.

[0074] In some embodiments, the present disclosure provides an APOC3 oligonucleotide composition comprising a first plurality of oligonucleotides capable of directing single-stranded RNA interference, wherein oligonucleotides of the first plurality are of a particular oligonucleotide type defined by:

[0075] 1) base sequence;

[0076] 2) pattern of backbone linkages;

[0077] 3) pattern of backbone chiral centers; and

[0078] 4) pattern of backbone phosphorus modifications.

[0079] In some embodiments, the present disclosure provides an APOC3 oligonucleotide composition comprising a first plurality of oligonucleotides of an APOC3 oligonucleotide type, wherein the oligonucleotide type is defined by:

[0080] 1) base sequence;

[0081] 2) pattern of backbone linkages;

[0082] 3) pattern of backbone chiral centers; and

[0083] 4) pattern of backbone phosphorus modifications,

which composition is chirally controlled in that it is enriched, relative to a substantially racemic preparation of oligonucleotides having the same base sequence, for oligonucleotides of the particular oligonucleotide type,

[0084] the oligonucleotide composition being characterized in that, when it is contacted with the transcript, knockdown of the transcript is improved relative to that observed under reference conditions selected from the group consisting of absence of the composition, presence of a reference composition, and combinations thereof.

[0085] In some embodiments, the present disclosure provides an APOC3 oligonucleotide composition comprising a first plurality of oligonucleotides which are capable of directing single-stranded RNA interference and are of an APOC3 oligonucleotide type, wherein the oligonucleotide type is defined by:

[0086] 1) base sequence;

[0087] 2) pattern of backbone linkages;

[0088] 3) pattern of backbone chiral centers; and

[0089] 4) pattern of backbone phosphorus modifications,

which composition is chirally controlled in that it is enriched, relative to a substantially racemic preparation of oligonucleotides having the same base sequence, for oligonucleotides of the particular oligonucleotide type,

[0090] the oligonucleotide composition being characterized in that, when it is contacted with the transcript in a RNA interference system, RNAi-mediated knockdown of the transcript is improved relative to that observed under reference conditions selected from the group consisting of absence of the composition, presence of a reference composition, and combinations thereof.

[0091] In some embodiments, a provided oligonucleotide has any of the Formats illustrated in FIG. 1, or any structural element illustrated in any of the Formats illustrated in FIG. 1.

[0092] In some embodiments, a provided single-stranded RNAi agent has any of the Formats illustrated in FIG. 1, or any structural element illustrated in any of the Formats illustrated in FIG. 1.

[0093] Among other things, the present disclosure presents data showing that various oligonucleotides of the disclosed Formats are capable of directing a decrease in the expression and/or level of a target gene or its gene product, when targeted against any of several different sequences, in any of several different genes. In some embodiments, the present disclosure presents data showing that various RNAi agents of the disclosed Formats are capable of directing RNA interference against any of many different sequences, in any of many different genes.

[0094] In some embodiments, an APOC3 oligonucleotide having any of the structures described and/or illustrated herein is capable of directing RNA interference. In some embodiments, an APOC3 oligonucleotide having any of the structures described and/or illustrated herein is capable of directing RNase H-mediated knockdown. In some embodiments, an APOC3 oligonucleotide having any of the structures described and/or illustrated herein is capable of directing RNA interference and/or RNase H-mediated knockdown. In some embodiments, an APOC3 oligonucleotide comprises any structural element of any oligonucleotide described herein, or any Format described herein or illustrated in FIG. 1. In some embodiments, an APOC3 oligonucleotide comprises any structural element of any oligonucleotide described herein, or any Format described herein or illustrated in FIG. 1 and is capable of directing RNA interference. In some embodiments, an APOC3 oligonucleotide comprises any structural element of any oligonucleotide described herein, or any Format described herein or illustrated in FIG. 1 and is capable of directing RNase H-mediated knockdown. In some embodiments, an APOC3 oligonucleotide comprises any structural element of any oligonucleotide described herein, or any Format described herein or illustrated in FIG. 1 and is capable of directing RNA interference and/or RNase H-mediated knockdown.

[0095] In some embodiments, a RNAi agent comprises any one or more of: a 5′-end structure, a 5′-end region, a seed region, a post-seed region, and a 3′-end region, and an optional additional chemical moiety. In some embodiments, a seed region is any seed region described herein or known in the art. In some embodiments, a post-seed region can be any region between a seed region and a 3′-end region described herein or known in the art. In some embodiments, a 3′-end region can be any 3′-end region described herein or known in the art. In some embodiments, any optional additional chemical moiety can be any optional additional chemical moiety described herein or known in the art. Any individual 5′-end structure, 5′-end region, seed region, post-seed region, 3′-end region, and optional additional chemical moiety described herein or known in the art can be combined, independently, with any other 5′-end structure, 5′-end region, seed region, post-seed region, 3′-end region, and optional additional chemical moiety described herein or known in the art. In some embodiments, as non-limiting examples, a region of a single-stranded RNAi agent is a 5′-end structure, a 5′-end region, a seed region, a post-seed region, a portion of a seed region, a portion of a post-seed region, or a 3′-terminal dinucleotide.

[0096] In some embodiments, the base sequence of a provided oligonucleotide consists of the base sequence of any oligonucleotide disclosed herein. In some embodiments, the base sequence of a provided oligonucleotide comprises the base sequence of any oligonucleotide disclosed herein. In some embodiments, the base sequence of a provided oligonucleotide comprises a sequence comprising the sequence of 15 contiguous bases of the base sequence of any oligonucleotide disclosed herein. In some embodiments, the base sequence of a provided oligonucleotide comprises a sequence comprising the sequence of 20 contiguous bases, with up to 5 mismatches, of the base sequence of any oligonucleotide disclosed herein.

[0097] In some embodiments, a provided oligonucleotide is capable of directing a decrease in the expression and/or level of a target gene or its gene product. In some embodiments, a provided oligonucleotide is capable of directing single-stranded RNAi interference. In some embodiments, a provided oligonucleotide is capable of directing RNase H-mediated knockdown. In some embodiments, a provided oligonucleotide is capable of directing single-stranded RNA interference and RNase H-mediated knockdown. In some embodiments, a oligonucleotide comprises a sequence which targets any transcript or gene targeted by a oligonucleotide disclosed herein.

[0098] In some embodiments, provided oligonucleotides target APOC3.

[0099] In some embodiments, provided oligonucleotides can be used to decrease or inhibit the activity, level and/or expression of an APOC3 gene or its gene product. In some embodiments, provided oligonucleotides can be used to decrease or inhibit the activity, level and/or expression of a gene or its gene product, wherein abnormal or excessive activity, level and/or expression of, a deleterious mutation in, or abnormal tissue or inter- or intracellular distribution of a gene or its gene product is related to, causes and/or is associated with a disorder. In some embodiments, provided oligonucleotides can be used to treat a disorder and/or to manufacture a medicament for the treatment of a disorder related to, caused and/or associated with the abnormal or excessive activity, level and/or expression or abnormal distribution of a gene or its gene product.

[0100] In some embodiments, the present disclosure pertains to methods of using oligonucleotides disclosed herein which are capable of targeting APOC3 and useful for treating and/or manufacturing a treatment for an APOC3-related disorder.

[0101] In some embodiments, an APOC3 oligonucleotide capable of targeting a gene comprises a base sequence which is a portion of or complementary or substantially complementary to a portion of the base sequence of the target gene. In some embodiments, a portion is at least 15 bases long. In some embodiments, a base sequence of a single-stranded RNAi agent can comprise or consist of a base sequence which has a specified maximum number of mismatches from a specified base sequence.

[0102] In some embodiments, a mismatch is a difference between the base sequence or length when two sequences are maximally aligned and compared. As a non-limiting example, a mismatch is counted if a difference exists between the base at a particular location in one sequence and the base at the corresponding position in another sequence. Thus, a mismatch is counted, for example, if a position in one sequence has a particular base (e.g., A), and the corresponding position on the other sequence has a different base (e.g., G, C or U). A mismatch is also counted, e.g., if a position in one sequence has a base (e.g., A), and the corresponding position on the other sequence has no base (e.g., that position is an abasic nucleotide which comprises a phosphate-sugar backbone but no base) or that position is skipped. A single-stranded nick in either sequence (or in the sense or antisense strand) may not be counted as mismatch, for example, no mismatch would be counted if one sequence comprises the sequence 5′-AG-3′, but the other sequence comprises the sequence 5′-AG-3′ with a single-stranded nick between the A and the G. A base modification is generally not considered a mismatch, for example, if one sequence comprises a C, and the other sequence comprises a modified C (e.g., 5mC) at the same position, no mismatch may be counted. In some embodiments, for purposes of counting mismatches, substitution of a T for U or vice versa is not considered a mismatch.

[0103] In some embodiments, an APOC3 oligonucleotide is complementary or totally or 100% complementary to a target sequence (e.g., a RNA, such as a mRNA), meaning that the base sequence of the oligonucleotide has no mismatches with a sequence which is fully complementary (e.g., base-pairs via Watson-Crick basepairing) to the target sequence. Without wishing to be bound by any particular theory, the disclosure notes that, for a single-stranded RNAi agent, it is not necessary for the 5′-end nucleotide moiety or the 3′-terminal dinucleotide to base-pair with the target. These may be mismatches. In addition, an antisense oligonucleotide or single-stranded RNAi agent can have a small number of internal mismatches and still direct a decrease in the expression and/or level of a target gene or its gene product and/or direct RNase H-mediated knockdown and/or RNA interference. If a first base sequence of an APOC3 oligonucleotide, (e.g., antisense oligonucleotide or single-stranded RNAi agent) has a small number of mismatches from a reference base sequence which is 100% complementary to a target sequence, then the first base sequence is substantially complementary to the target sequence. In some embodiments, an APOC3 oligonucleotide, (e.g., antisense oligonucleotide or single-stranded RNAi agent) can have a base sequence which is complementary or substantially complementary to a target sequence. In some embodiments, complementarity is determined based on Watson-Crick base pairs (guanine-cytosine and adenine-thymine/uracil), wherein guanine, cytosine, adenine, thymine, uracil may be optionally and independently modified but maintains their pairing hydrogen-bonding patters as unmodified. In some embodiments, a sequence complementary to another sequence comprises at least 5, 6, 7, 8, 9, 10, 11, 12, 13, 14, 15, 16, 17, 18, 19, 20 bases.

[0104] In some embodiments, an APOC3 oligonucleotide, oligonucleotide composition or oligonucleotide type has a common pattern of backbone linkages. In some embodiments, a common pattern of backbone linkages comprises at least 10 modified internucleotidic linkages.

[0105] In some embodiments, a common pattern of backbone linkages comprises at least 10 phosphorothioate linkages. In some embodiments, an APOC3 oligonucleotide, oligonucleotide composition or oligonucleotide type has a common pattern of backbone chiral centers. In some embodiments, a common pattern of backbone chiral centers comprises at least 1 internucleotidic linkage in the Sp configuration. In some embodiments, a common pattern of backbone chiral centers comprises at least 1 internucleotidic linkage which is phosphorothioate in the Sp configuration. In some embodiments, oligonucleotides in provided compositions have a common pattern of backbone phosphorus modifications. In some embodiments, a provided composition is an APOC3 oligonucleotide composition that is chirally controlled in that the composition contains a predetermined level of oligonucleotides of an individual oligonucleotide type, wherein an APOC3 oligonucleotide type is defined by:

[0106] 1) base sequence;

[0107] 2) pattern of backbone linkages;

[0108] 3) pattern of backbone chiral centers; and

[0109] 4) pattern of backbone phosphorus modifications.

[0110] As noted above and understood in the art, in some embodiments, base sequence of an APOC3 oligonucleotide may refer to the identity and/or modification status of nucleoside residues (e.g., of sugar and/or base components, relative to standard naturally occurring nucleotides such as adenine, cytosine, guanosine, thymine, and uracil) in the oligonucleotide and/or to the hybridization character (i.e., the ability to hybridize with particular complementary residues) of such residues.

[0111] In some embodiments, a particular oligonucleotide type may be defined by

[0112] 1A) base identity;

[0113] 1B) pattern of base modification;

[0114] 1C) pattern of sugar modification;

[0115] 2) pattern of backbone linkages;

[0116] 3) pattern of backbone chiral centers; and

[0117] 4) pattern of backbone phosphorus modifications.

Thus, in some embodiments, oligonucleotides of a particular type may share identical bases but differ in their pattern of base modifications and/or sugar modifications. In some embodiments, oligonucleotides of a particular type may share identical bases and pattern of base modifications (including, e.g., absence of base modification), but differ in pattern of sugar modifications.

[0118] In some embodiments, oligonucleotides of a particular type are chemically identical in that they have the same base sequence (including length), the same pattern of chemical modifications to sugar and base moieties, the same pattern of backbone linkages (e.g., pattern of natural phosphate linkages, phosphorothioate linkages, phosphorothioate triester linkages, and combinations thereof), the same pattern of backbone chiral centers (e.g., pattern of stereochemistry (Rp/Sp) of chiral internucleotidic linkages), and the same pattern of backbone phosphorus modifications (e.g., pattern of modifications on the internucleotidic phosphorus atom, such as —S⁻, and -L-R¹ of Formula I).

[0119] Among other things, the present disclosure provides oligonucleotide compositions and technologies for optimizing properties, e.g., improved single-stranded RNA interference, RNase H-mediated knockdown, etc. In some embodiments, the present disclosure provides methods for lowering immune response associated with administration of oligonucleotides and compositions thereof (i.e., of administering oligonucleotide compositions so that undesirable immune responses to oligonucleotides in the compositions are reduced, for example relative to those observed with a reference composition of nucleotides of comparable or identical nucleotide sequence). In some embodiments, the present disclosure provides methods for increasing binding to certain proteins by oligonucleotides and compositions thereof. In some embodiments, the present disclosure provides methods for increasing binding to certain proteins by oligonucleotides and compositions thereof. In some embodiments, the present disclosure provides methods for enhancing delivery of oligonucleotides and compositions thereof. Among other things, the present disclosure encompasses the recognition that optimal delivery of oligonucleotides to their targets, in some embodiments, involves balance of oligonucleotides binding to certain proteins so that oligonucleotides can be transported to the desired locations, and oligonucleotide release so that oligonucleotides can be properly released from certain proteins to perform their desired functions, for example, hybridization with their targets, cleavage of their targets, inhibition of translation, modulation of transcript processing, etc. As exemplified in this disclosure, the present disclosure recognizes, among other things, that improvement of oligonucleotide properties can be achieved through chemical modifications and/or stereochemistry.

[0120] In some embodiments, the present disclosure provides a method for treating or preventing a disease, comprising administering to a subject an APOC3 oligonucleotide composition described herein.

[0121] In some embodiments, a disease is one in which, after administering a provided composition, knocking down a target nucleic acid via single-stranded RNA interference can repair, restore or introduce a new beneficial function.

[0122] In some embodiments, a common sequence comprises a sequence selected from Table 1A. In some embodiments, a common sequence is a sequence selected from Table 1A. In some embodiments, a pattern of backbone chiral centers is selected from those described in Table 1A.

[0123] In some embodiments, the present disclosure provides a method comprising administering a composition comprising a first plurality of oligonucleotides, which composition displays improved delivery as compared with a reference composition comprising a plurality of oligonucleotides, each of which also has the common base sequence but which differs structurally from the oligonucleotides of the first plurality in that:

[0124] individual oligonucleotides within the reference plurality differ from one another in stereochemical structure; and/or

[0125] at least some oligonucleotides within the reference plurality have a structure different from a structure represented by the plurality of oligonucleotides of the composition.

[0126] In some embodiments, the present disclosure provides a method of administering an APOC3 oligonucleotide composition comprising a first plurality of oligonucleotides capable of directing a decrease in the expression and/or level of a target gene or its gene product and having a common nucleotide sequence, the improvement that comprises:

[0127] administering an APOC3 oligonucleotide comprising a first plurality of oligonucleotides that is characterized by improved delivery relative to a reference oligonucleotide composition of the same common nucleotide sequence.

[0128] In some embodiments, the present disclosure provides a method of administering an APOC3 oligonucleotide composition comprising a first plurality of oligonucleotides capable of directing single-stranded RNA interference and having a common nucleotide sequence, the improvement that comprises:

[0129] administering an APOC3 oligonucleotide comprising a first plurality of oligonucleotides that is characterized by improved delivery relative to a reference oligonucleotide composition of the same common nucleotide sequence.

[0130] In some embodiments, the present disclosure provides a single-stranded RNAi agent of an APOC3 oligonucleotide selected from any of the Tables, including but not limited to Table 1A, or otherwise disclosed herein. In some embodiments, the present disclosure provides a single-stranded RNAi agent of an APOC3 oligonucleotide selected from any of the Tables, including but not limited to Table 1A, or otherwise disclosed herein, wherein the oligonucleotide is conjugated to a lipid moiety.

[0131] In some embodiments, a provided oligonucleotide comprises a lipid moiety. In some embodiments, a lipid moiety is incorporated by conjugation with a lipid. In some embodiments, a lipid moiety is a fatty acid. In some embodiments, an APOC3 oligonucleotide is conjugated to a fatty acid. In some embodiments, a provided single-stranded RNAi agent further comprises a lipid. In some embodiments, a provided single-stranded RNAi agent comprises a lipid moiety conjugated at the 9^{th} or 11^{th} nucleotide (counting from the 5′-end). In some embodiments, an APOC3 oligonucleotide is conjugated at the base to a fatty acid. In some embodiments, a provided single-stranded RNAi agent comprises a lipid moiety. In some embodiments, a provided single-stranded RNAi agent comprises a lipid moiety conjugated at the base at the 9^{th} or 11^{th} nucleotide (counting from the 5′-end).

[0132] In some embodiments, a single-stranded RNAi agent is any one of the preceding compositions, further comprising one or more additional components.

[0133] In some embodiments, a provided oligonucleotide is capable of degrading a target transcript, e.g., RNA, through both a RNase H mechanism and a RNAi mechanism.

[0134] In some embodiments, conjugation of a lipid moiety to an APOC3 oligonucleotide improves at least one property of the oligonucleotide. In some embodiments, improved properties include increased activity (e.g., increased ability to direct a decrease in the expression and/or level of a target gene or its gene product and/or direct single-stranded RNA interference and/or direct RNase H-mediated knockdown) and/or improved distribution to a tissue. In some embodiments, a tissue is muscle tissue. In some embodiments, a tissue is skeletal muscle, gastrocnemius, triceps, heart or diaphragm. In some embodiments, improved properties include reduced hTLR9 agonist activity. In some embodiments, improved properties include hTLR9 antagonist activity. In some embodiments, improved properties include increased hTLR9 antagonist activity.

[0135] In general, properties of oligonucleotide compositions as described herein can be assessed using any appropriate assay.

[0136] Those of skill in the art will be aware of and/or will readily be able to develop appropriate assays for particular oligonucleotide compositions.

### Definitions

[0137] As used herein, the following definitions shall apply unless otherwise indicated. For purposes of this disclosure, the chemical elements are identified in accordance with the Periodic Table of the Elements, CAS version, Handbook of Chemistry and Physics, 75th Ed. Additionally, general principles of organic chemistry are described in “Organic Chemistry”, Thomas Sorrell, University Science Books, Sausalito: 1999, and “March's Advanced Organic Chemistry”, 5th Ed., Ed.: Smith, M. B. and March, J., John Wiley & Sons, New York: 2001.

[0138] As used herein in the specification, “a” or “an” may mean one or more. As used herein in the claim(s), when used in conjunction with the word “comprising”, the words “a” or “an” may mean one or more than one. As used herein “another” may mean at least a second or more.

[0139] The term “about” refers to a relative term denoting an approximation of plus or minus 10% of the nominal value to which it refers, or in one embodiment, of plus or minus 5%, or, in another embodiment, of plus or minus 2%. For the field of this disclosure, this level of approximation is appropriate unless the value is specifically stated to require a tighter range.

[0140] Aliphatic: As used herein, “aliphatic” means a straight-chain (i.e., unbranched) or branched, substituted or unsubstituted hydrocarbon chain that is completely saturated or that contains one or more units of unsaturation, or a substituted or unsubstituted monocyclic, bicyclic, or polycyclic hydrocarbon ring that is completely saturated or that contains one or more units of unsaturation (but not aromatic), or combinations thereof. In some embodiments, aliphatic groups contain 1-50 aliphatic carbon atoms. In some embodiments, aliphatic groups contain 1-20 aliphatic carbon atoms. In other embodiments, aliphatic groups contain 1-10 aliphatic carbon atoms. In other embodiments, aliphatic groups contain 1-9 aliphatic carbon atoms. In other embodiments, aliphatic groups contain 1-8 aliphatic carbon atoms. In other embodiments, aliphatic groups contain 1-7 aliphatic carbon atoms. In other embodiments, aliphatic groups contain 1-6 aliphatic carbon atoms. In still other embodiments, aliphatic groups contain 1-5 aliphatic carbon atoms, and in yet other embodiments, aliphatic groups contain 1, 2, 3, or 4 aliphatic carbon atoms. Suitable aliphatic groups include, but are not limited to, linear or branched, substituted or unsubstituted alkyl, alkenyl, alkynyl groups and hybrids thereof such as (cycloalkyl)alkyl, (cycloalkenyl)alkyl or (cycloalkyl)alkenyl.

[0141] Alkenyl: As used herein, the term “alkenyl” refers to an alkyl group, as defined herein, having one or more double bonds.

[0142] Alkyl: As used herein, the term “alkyl” is given its ordinary meaning in the art and may include saturated aliphatic groups, including straight-chain alkyl groups, branched-chain alkyl groups, cycloalkyl (alicyclic) groups, alkyl substituted cycloalkyl groups, and cycloalkyl substituted alkyl groups. In some embodiments, an alkyl has 1-100 carbon atoms. In certain embodiments, a straight chain or branched chain alkyl has about 1-20 carbon atoms in its backbone (e.g., C₁-C₂₀ for straight chain, C₂-C₂₀ for branched chain), and alternatively, about 1-10. In some embodiments, cycloalkyl rings have from about 3-10 carbon atoms in their ring structure where such rings are monocyclic, bicyclic, or polycyclic, and alternatively about 5, 6 or 7 carbons in the ring structure. In some embodiments, an alkyl group may be a lower alkyl group, wherein a lower alkyl group comprises 1-4 carbon atoms (e.g., C₁-C₄ for straight chain lower alkyls).

[0143] Alkynyl: As used herein, the term “alkynyl” refers to an alkyl group, as defined herein, having one or more triple bonds.

[0144] Antisense: The term “Antisense”, as used herein, refers to a characteristic of an oligonucleotide or other nucleic acid having a base sequence complementary or substantially complementary to a target nucleic acid to which it is capable of hybridizing. In some embodiments, a target nucleic acid is a target gene mRNA. In some embodiments, hybridization is required for or results in at one activity, e.g., a decrease in the level, expression or activity of the target nucleic acid or a gene product thereof. The term “antisense oligonucleotide”, as used herein, refers to an oligonucleotide complementary to a target nucleic acid. In some embodiments, an antisense oligonucleotide is capable of directing a decrease in the level, expression or activity of the target nucleic acid or a gene product thereof. In some embodiments, an antisense oligonucleotide is capable of directing a decrease in the level, expression or activity of the target nucleic acid or a gene product thereof, via a mechanism that involves RNaseH, steric hindrance and/or RNA interference.

[0145] Approximately: As used herein, the terms “approximately” or “about” in reference to a number are generally taken to include numbers that fall within a range of 5%, 10%, 15%, or 20% in either direction (greater than or less than) of the number unless otherwise stated or otherwise evident from the context (except where such number would be less than 0% or exceed 100% of a possible value). In some embodiments, use of the term “about” in reference to dosages means±5 mg/kg/day.

[0146] Aryl: The term “aryl”, as used herein, used alone or as part of a larger moiety as in “aralkyl,” “aralkoxy,” or “aryloxyalkyl,” refers to monocyclic, bicyclic or polycyclic ring systems having a total of five to thirty ring members, wherein at least one ring in the system is aromatic. In some embodiments, an aryl group is a monocyclic, bicyclic or polycyclic ring system having a total of five to fourteen ring members, wherein at least one ring in the system is aromatic, and wherein each ring in the system contains 3 to 7 ring members. In some embodiments, an aryl group is a biaryl group. The term “aryl” may be used interchangeably with the term “aryl ring.” In certain embodiments of the present disclosure, “aryl” refers to an aromatic ring system which includes, but not limited to, phenyl, biphenyl, naphthyl, binaphthyl, anthracyl and the like, which may bear one or more substituents. Also included within the scope of the term “aryl,” as it is used herein, is a group in which an aromatic ring is fused to one or more non-aromatic rings, such as indanyl, phthalimidyl, naphthimidyl, phenanthridinyl, or tetrahydronaphthyl, and the like.

[0147] Characteristic portion: As used herein, the phrase a “characteristic portion” of a protein or polypeptide is one that contains a continuous stretch of amino acids, or a collection of continuous stretches of amino acids, that together are characteristic of a protein or polypeptide. Each such continuous stretch generally will contain at least two amino acids. In general, a characteristic portion is one that, in addition to the sequence identity specified above, shares at least one functional characteristic with the relevant intact protein.

[0148] Characteristic structural element: The term “characteristic structural element” or “structural element” refers to a distinctive structural element that is found in all members of a family of polypeptides, small molecules, or nucleic acids, and therefore can be used by those of ordinary skill in the art to define members of the family. In some embodiments, a structural element of a single-stranded RNAi agent includes, but is not limited to: a 5′-end structure, a 5′-end region, a 5′ nucleotide moiety, a seed region, a post-seed region, a 3′-end region, a 3′-terminal dinucleotide, a 3′ cap, a pattern of modifications, a pattern of stereochemistry in the backbone, additional chemical moieties, etc.

[0149] Comparable: The term “comparable” is used herein to describe two (or more) sets of conditions or circumstances that are sufficiently similar to one another to permit comparison of results obtained or phenomena observed. In some embodiments, comparable sets of conditions or circumstances are characterized by a plurality of substantially identical features and one or a small number of varied features. Those of ordinary skill in the art will appreciate that sets of conditions are comparable to one another when characterized by a sufficient number and type of substantially identical features to warrant a reasonable conclusion that differences in results obtained or phenomena observed under the different sets of conditions or circumstances are caused by or indicative of the variation in those features that are varied.

[0150] Cycloaliphatic: The term “cycloaliphatic,” “carbocycle,” “carbocyclyl,” “carbocyclic radical,” and “carbocyclic ring,” are used interchangeably, and as used herein, refer to saturated or partially unsaturated, but non-aromatic, cyclic aliphatic monocyclic, bicyclic, or polycyclic ring systems, as described herein, having, unless otherwise specified, from 3 to 30 ring members. Cycloaliphatic groups include, without limitation, cyclopropyl, cyclobutyl, cyclopentyl, cyclopentenyl, cyclohexyl, cyclohexenyl, cycloheptyl, cycloheptenyl, cyclooctyl, cyclooctenyl, norbornyl, adamantyl, and cyclooctadienyl. In some embodiments, a cycloaliphatic group has 3-6 carbons. In some embodiments, a cycloaliphatic group is saturated and is cycloalkyl. The term “cycloaliphatic” may also include aliphatic rings that are fused to one or more aromatic or nonaromatic rings, such as decahydronaphthyl or tetrahydronaphthyl. In some embodiments, a cycloaliphatic group is bicyclic. In some embodiments, a cycloaliphatic group is tricyclic. In some embodiments, a cycloaliphatic group is polycyclic. In some embodiments, “cycloaliphatic” refers to C₃-C₆ monocyclic hydrocarbon, or C₈-C₁₀ bicyclic or polycyclic hydrocarbon, that is completely saturated or that contains one or more units of unsaturation, but which is not aromatic, that has a single point of attachment to the rest of the molecule, or a C₉-C₁₆ polycyclic hydrocarbon that is completely saturated or that contains one or more units of unsaturation, but which is not aromatic, that has a single point of attachment to the rest of the molecule.

[0151] Heteroaliphatic: The term “heteroaliphatic”, as used herein, is given its ordinary meaning in the art and refers to aliphatic groups as described herein in which one or more carbon atoms are independently replaced with one or more heteroatoms (e.g., oxygen, nitrogen, sulfur, silicon, phosphorus, and the like). In some embodiments, one or more units selected from C, CH, CH₂, and CH₃ are independently replaced by one or more heteroatoms (including oxidized and/or substituted form thereof). In some embodiments, a heteroaliphatic group is heteroalkyl. In some embodiments, a heteroaliphatic group is heteroalkenyl.

[0152] Heteroalkyl: The term “heteroalkyl”, as used herein, is given its ordinary meaning in the art and refers to alkyl groups as described herein in which one or more carbon atoms are independently replaced with one or more heteroatoms (e.g., oxygen, nitrogen, sulfur, silicon, phosphorus, and the like). Examples of heteroalkyl groups include, but are not limited to, alkoxy, poly(ethylene glycol)-, alkyl-substituted amino, tetrahydrofuranyl, piperidinyl, morpholinyl, etc.

[0153] Heteroaryl: The terms “heteroaryl” and “heteroar-”, as used herein, used alone or as part of a larger moiety, e.g., “heteroaralkyl,” or “heteroaralkoxy,” refer to monocyclic, bicyclic or polycyclic ring systems having a total of five to thirty ring members, wherein at least one ring in the system is aromatic and at least one aromatic ring atom is a heteroatom. In some embodiments, a heteroaryl group is a group having 5 to 10 ring atoms (i.e., monocyclic, bicyclic or polycyclic), in some embodiments 5, 6, 9, or 10 ring atoms. In some embodiments, a heteroaryl group has 6, 10, or 14 π electrons shared in a cyclic array; and having, in addition to carbon atoms, from one to five heteroatoms. Heteroaryl groups include, without limitation, thienyl, furanyl, pyrrolyl, imidazolyl, pyrazolyl, triazolyl, tetrazolyl, oxazolyl, isoxazolyl, oxadiazolyl, thiazolyl, isothiazolyl, thiadiazolyl, pyridyl, pyridazinyl, pyrimidinyl, pyrazinyl, indolizinyl, purinyl, naphthyridinyl, and pteridinyl. In some embodiments, a heteroaryl is a heterobiaryl group, such as bipyridyl and the like. The terms “heteroaryl” and “heteroar-”, as used herein, also include groups in which a heteroaromatic ring is fused to one or more aryl, cycloaliphatic, or heterocyclyl rings, where the radical or point of attachment is on the heteroaromatic ring. Non-limiting examples include indolyl, isoindolyl, benzothienyl, benzofuranyl, dibenzofuranyl, indazolyl, benzimidazolyl, benzthiazolyl, quinolyl, isoquinolyl, cinnolinyl, phthalazinyl, quinazolinyl, quinoxalinyl, 4H-quinolizinyl, carbazolyl, acridinyl, phenazinyl, phenothiazinyl, phenoxazinyl, tetrahydroquinolinyl, tetrahydroisoquinolinyl, and pyrido[2,3-b]-1,4-oxazin-3(4H)-one. A heteroaryl group may be monocyclic, bicyclic or polycyclic. The term “heteroaryl” may be used interchangeably with the terms “heteroaryl ring,” “heteroaryl group,” or “heteroaromatic,” any of which terms include rings that are optionally substituted. The term “heteroaralkyl” refers to an alkyl group substituted by a heteroaryl group, wherein the alkyl and heteroaryl portions independently are optionally substituted.

[0154] Heteroatom: The term “heteroatom”, as used herein, means an atom that is not carbon or hydrogen. In some embodiments, a heteroatom is oxygen, sulfur, nitrogen, phosphorus, or silicon (including any oxidized form of nitrogen, sulfur, phosphorus, or silicon; the quaternized form of any basic nitrogen or a substitutable nitrogen of a heterocyclic ring (for example, N as in 3,4-dihydro-2H-pyrrolyl), NH (as in pyrrolidinyl) or NR⁺ (as in N-substituted pyrrolidinyl); etc.).

[0155] Heterocycle: As used herein, the terms “heterocycle,” “heterocyclyl,” “heterocyclic radical,” and “heterocyclic ring”, as used herein, are used interchangeably and refer to a monocyclic, bicyclic or polycyclic ring moiety (e.g., 3-30 membered) that is saturated or partially unsaturated and has one or more heteroatom ring atoms. In some embodiments, a heterocyclyl group is a stable 5-to 7-membered monocyclic or 7-to 10-membered bicyclic heterocyclic moiety that is either saturated or partially unsaturated, and having, in addition to carbon atoms, one or more, preferably one to four, heteroatoms, as defined above. When used in reference to a ring atom of a heterocycle, the term “nitrogen” includes substituted nitrogen. As an example, in a saturated or partially unsaturated ring having 0-3 heteroatoms selected from oxygen, sulfur and nitrogen, the nitrogen may be N (as in 3,4-dihydro-2H-pyrrolyl), NH (as in pyrrolidinyl), or ⁺NR (as in N-substituted pyrrolidinyl). A heterocyclic ring can be attached to its pendant group at any heteroatom or carbon atom that results in a stable structure and any of the ring atoms can be optionally substituted. Examples of such saturated or partially unsaturated heterocyclic radicals include, without limitation, tetrahydrofuranyl, tetrahydrothienyl, pyrrolidinyl, piperidinyl, pyrrolinyl, tetrahydroquinolinyl, tetrahydroisoquinolinyl, decahydroquinolinyl, oxazolidinyl, piperazinyl, dioxanyl, dioxolanyl, diazepinyl, oxazepinyl, thiazepinyl, morpholinyl, and quinuclidinyl. The terms “heterocycle,” “heterocyclyl,” “heterocyclyl ring,” “heterocyclic group,” “heterocyclic moiety,” and “heterocyclic radical,” are used interchangeably herein, and also include groups in which a heterocyclyl ring is fused to one or more aryl, heteroaryl, or cycloaliphatic rings, such as indolinyl, 3H-indolyl, chromanyl, phenanthridinyl, or tetrahydroquinolinyl. A heterocyclyl group may be monocyclic, bicyclic or polycyclic. The term “heterocyclylalkyl” refers to an alkyl group substituted by a heterocyclyl, wherein the alkyl and heterocyclyl portions independently are optionally substituted.

[0156] Lower alkyl: The term “lower alkyl” refers to a C₁₋₄ straight or branched alkyl group. Example lower alkyl groups are methyl, ethyl, propyl, isopropyl, butyl, isobutyl, and tert-butyl.

[0157] Lower haloalkyl: The term “lower haloalkyl” refers to a C₁₋₄ straight or branched alkyl group that is substituted with one or more halogen atoms.

[0158] Optionally Substituted: As described herein, compounds, e.g., oligonucleotides, of the disclosure may contain optionally substituted and/or substituted moieties. In general, the term “substituted,” whether preceded by the term “optionally” or not, means that one or more hydrogens of the designated moiety are replaced with a suitable substituent. Unless otherwise indicated, an “optionally substituted” group may have a suitable substituent at each substitutable position of the group, and when more than one position in any given structure may be substituted with more than one substituent selected from a specified group, the substituent may be either the same or different at every position. In some embodiments, an optionally substituted group is unsubstituted. Combinations of substituents envisioned by this disclosure are preferably those that result in the formation of stable or chemically feasible compounds. The term “stable,” as used herein, refers to compounds that are not substantially altered when subjected to conditions to allow for their production, detection, and, in certain embodiments, their recovery, purification, and use for one or more of the purposes disclosed herein.

[0159] Suitable monovalent substituents on a substitutable atom, e.g., a suitable carbon atom, are independently halogen; —(CH₂)₀₋₄R^{◯}; —(CH₂)₀₋₄OR^{◯}; —O(CH₂)₀₋₄R^{◯}, —O—(CH₂)₀₋₄C(O)OR^{◯}; —(CH₂)₀₋₄CH(OR^{◯})₂; —(CH₂)₀₋₄Ph, which may be substituted with R^{◯}; —(CH₂)₀₋₄O(CH₂)₀₋₁Ph which may be substituted with R^{◯}; —CH═CHPh, which may be substituted with R^{◯}; —(CH₂)₀₋₄O(CH₂)₀₋₁-pyridyl which may be substituted with R^{◯}; —NO₂; —CN; —N₃; —(CH₂)₀₋₄N(R^{◯})₂; —(CH₂)₀₋₄N(R^{◯})C(O)R^{◯}; —N(R^{◯})C(S)R^{◯}; —(CH₂)₀₋₄N(R^{◯})C(O)NR^{◯}₂; —N(R^{◯})C(S)NR^{◯}₂; —(CH₂)₀₋₄N(R^{◯})C(O)OR^{◯}; —N(R^{◯})N(R^{◯})C(O)R^{◯}; —N(R^{◯})N(R^{◯})C(O)NR^{◯}₂; —N(R^{◯})N(R^{◯})C(O)OR^{◯}; —(CH₂)₀₋₄C(O)R^{◯}; —C(S)R^{◯}; —(CH₂)₀₋₄C(O)OR^{◯}; —(CH₂)₀₋₄C(O)SR^{◯}; —(CH₂)₀₋₄C(O)OSiR^{◯}₃; —(CH₂)₀₋₄OC(O)R^{◯}; —OC(O)(CH₂)₀₋₄SR, —SC(S)SR^{◯}; —(CH₂)₀₋₄SC(O)R^{◯}; —(CH₂)₀₋₄C(O)NR^{◯}₂; —C(S)NR^{◯}₂; —C(S)SR^{◯}; —SC(S)SR^{◯}, —(CH₂)₀₋₄OC(O)NR^{◯}₂; —C(O)N(OR^{◯})R^{◯}; —C(O)C(O)R^{◯}; —C(O)CH₂C(O)R^{◯}; —C(NOR^{◯})R^{◯}; —(CH₂)₀₋₄SSR^{◯}; —(CH₂)₀₋₄S(O)₂R^{◯}; —(CH₂)₀₋₄S(O)₂OR^{◯}; —(CH₂)₀₋₄OS(O)₂R^{◯}; —S(O)₂NR^{◯}₂; —(CH₂)₀₋₄S(O)R^{◯}; —N(R^{◯}S(O)₂NR^{◯}₂; —N(R^{◯}S(O)₂R^{◯}; —N(OR^{◯})R^{◯}; —C(NH)NR^{◯}₂; —Si(R^{◯})₃; —OSi(R^{◯})₃; —B(R^{◯})₂; —OB(R^{◯})₂; —OB(OR^{◯})₂; —P(R^{◯})₂; —P(OR^{◯})₂; —OP(R^{◯})₂; —OP(OR^{◯})₂; —P(O)(R^{◯})₂; —P(O)(OR^{◯})₂; —OP(O)(R^{◯})₂; —OP(O)(OR^{◯})₂; —OP(O)(OR^{◯})(SR^{◯}; —SP(O)(R^{◯})₂; —SP(O)(OR^{◯})₂; —N(R^{◯}P(O)(R^{◯})₂; —N(R^{◯})P(O)(OR^{◯})₂; —P(R^{◯})₂[B(R^{◯)}₃]; —P(OR^{◯})₂[B(R^{◯})₃]; —OP(R^{◯})₂[B(R^{◯})₃]; —OP(OR^{◯})₂[B(R^{◯})₃]; —(C₁₋₄ straight or branched)alkylene)O—N(R^{◯})₂; or —(C₁₋₄ straight or branched)alkylene)C(O)O—N(R^{◯})₂, wherein each R^{◯} may be substituted as defined below and is independently hydrogen, C₁₋₂₀ aliphatic, C₁₋₂₀ heteroaliphatic having 1-5 heteroatoms independently selected from nitrogen, oxygen, sulfur, silicon and phosphorus, —CH₂—(C₆₋₁₄ aryl), —O(CH₂)₀₋₁(C₆₋₁₄ aryl), —CH₂-(5-14 membered heteroaryl ring), a 5-20 membered, monocyclic, bicyclic, or polycyclic, saturated, partially unsaturated or aryl ring having 0-5 heteroatoms independently selected from nitrogen, oxygen, sulfur, silicon and phosphorus, or, notwithstanding the definition above, two independent occurrences of R^{◯}, taken together with their intervening atom(s), form a 5-20 membered, monocyclic, bicyclic, or polycyclic, saturated, partially unsaturated or aryl ring having 0-5 heteroatoms independently selected from nitrogen, oxygen, sulfur, silicon and phosphorus, which may be substituted as defined below.

[0160] Suitable monovalent substituents on R^{◯} (or the ring formed by taking two independent occurrences of R^{◯} together with their intervening atoms), are independently halogen, —(CH₂)₀₋₂R^{●}, -(haloR^{●}), —(CH₂)₀₋₂OH, —(CH₂)₀₋₂OR^{●}, —(CH₂)₀₋₂CH(OR^{●})₂; —O(haloR^{●}), —CN, —N₃, —(CH₂)₀₋₂C(O)R^{●}, —(CH₂)₀₋₂C(O)OH, —(CH₂)₀₋₂C(O)OR^{●}, —(CH₂)₀₋₂SR^{●}, —(CH₂)₀₋₂SH, —(CH₂)₀₋₂NH₂, —(CH₂)₀₋₂NHR^{●}, —(CH₂)₀₋₂NR^{●}₂, —NO₂, —SiR^{●}₃, —OSiR^{●}₃, —C(O)SR^{●}₃, —(C₁₋₄ straight or branched alkylene)C(O)OR^{●}, or —SSR^{●} wherein each R^{●} is unsubstituted or where preceded by “halo” is substituted only with one or more halogens, and is independently selected from C₁₋₄ aliphatic, —CH₂Ph, —O(CH₂)_{0_1}Ph, and a 5-6-membered saturated, partially unsaturated, or aryl ring having 0-4 heteroatoms independently selected from nitrogen, oxygen, and sulfur. Suitable divalent substituents on a saturated carbon atom of R^{∘} include ═O and ═S.

[0161] Suitable divalent substituents, e.g., on a suitable carbon atom, are independently the following: ═O, ═S, ═NNR*₂, ═NNHC(O)R*, ═NNHC(O)OR*, ═NNHS(O)₂R*, ═NR*, ═NOR*, —O(C(R*₂))₂₋₃O—, or —S(C(R*₂))₂₋₃S—, wherein each independent occurrence of R* is selected from hydrogen, C₁₋₆ aliphatic which may be substituted as defined below, and an unsubstituted 5-6-membered saturated, partially unsaturated, or aryl ring having 0-4 heteroatoms independently selected from nitrogen, oxygen, and sulfur. Suitable divalent substituents that are bound to vicinal substitutable carbons of an “optionally substituted” group include: —O(CR*₂)₂₋₃O—, wherein each independent occurrence of R* is selected from hydrogen, C₁₋₆ aliphatic which may be substituted as defined below, and an unsubstituted 5-6-membered saturated, partially unsaturated, or aryl ring having 0-4 heteroatoms independently selected from nitrogen, oxygen, and sulfur.

[0162] Suitable substituents on the aliphatic group of R* are independently halogen, —R^{●}, -(haloR^{●}), —OH, —OR^{●}, —O(haloR^{●}), —CN, —C(O)OH, —C(O)OR^{●}, —NH₂, —NHR^{●}, —NR^{●}₂, or —NO₂, wherein each R^{●} is unsubstituted or where preceded by “halo” is substituted only with one or more halogens, and is independently C₁₋₄ aliphatic, —CH₂Ph, —O(CH₂)₀₋₁Ph, or a 5-6-membered saturated, partially unsaturated, or aryl ring having 0-4 heteroatoms independently selected from nitrogen, oxygen, and sulfur.

[0163] Partially unsaturated: As used herein, the term “partially unsaturated” refers to a ring moiety that includes at least one double or triple bond. The term “partially unsaturated” is intended to encompass rings having multiple sites of unsaturation, but is not intended to include aryl or heteroaryl moieties, as herein defined.

[0164] RNA interference: As used herein, the terms “RNA interference” or “RNAi” refer to a post-transcriptional, targeted gene-silencing process involving the RISC (RNA-induced silencing complex). A process of RNAi reportedly naturally occurs when ribonuclease III (Dicer) cleaves a longer dsRNA into shorter fragments called siRNAs. A naturally-produced siRNA (small interfering RNA) is typically about 21 to 23 nucleotides long with an about 19 basepair duplex and two single-stranded overhangs and is typically RNA. These RNA segments then reportedly direct the degradation of the target nucleic acid, such as a mRNA or pre-mRNA. Dicer has reportedly also been implicated in the excision of 21- and 22-nucleotide small temporal RNAs (stRNAs) from precursor RNA of conserved structure that are implicated in translational control. Hutvagner et al. 2001, Science, 293, 834. Those skilled in the art are aware that RNAi can be mediated by a single-stranded or a double-stranded oligonucleotide that includes a sequence complementary or substantially complementary to a target sequence (e.g., in a target mRNA). Thus, in some embodiments of the present disclosure, a single-stranded oligonucleotide as described herein may act as an RNAi agent; in some embodiments, a double-stranded oligonucleotide as described herein may act as an RNAi agent. In some embodiments, an RNAi response involves an endonuclease complex, commonly referred to as an RNA-induced silencing complex (RISC), which directs cleavage of single-stranded mRNA complementary to the antisense strand of the siRNA. In some embodiments, RISC directs cleavage of target RNA complementary to provided oligonucleotides which can function as single-stranded RNAi agent. In some embodiments, cleavage of a target RNA takes place in the middle of the region complementary to the antisense strand of a siRNA duplex or single-stranded RNAi agent. In some embodiments, RNA interference is directed by a single-stranded oligonucleotide which acts as a single-stranded RNAi agent that can direct RNA interference in a mechanism involving the RISC pathway.

[0165] RNAi agent: As used herein, the term “RNAi agent,” “iRNA agent”, and the like, refer to an APOC3 oligonucleotide that, when administered to a system in which a target gene product (e.g., a transcript, such as a pre-mRNA or a mRNA, of a target gene) is being or has been expressed, reduces level and/or activity (e.g., translation) of that target gene product. In some embodiments, an RNAi agent may be or comprise a single-stranded oligonucleotide or a double-stranded oligonucleotide. In some embodiments, an RNAi agent may have a structure recognized in the art as a siRNA (short inhibitory RNA), shRNA (short or small hairpin RNA), dsRNA (double-stranded RNA), microRNA, etc. In some embodiments, an RNAi agent may specifically bind to a RNA target (e.g., a transcript of a target gene). In some embodiments, upon binding to its target, and RNAi agent is loaded to the RISC (RNA-induced silencing complex). In some embodiments, an RNAi agent directs degradation of, and/or inhibits translation of, its target, in some embodiments via a mechanism involving the RISC (RNA-induced silencing complex) pathway. In some embodiments, an RNAi agent is an APOC3 oligonucleotide that activates the RISC complex/pathway. In some embodiments, an RNAi agent comprises an antisense strand sequence. In some embodiments, an RNAi agent includes only one oligonucleotide strand (e.g., is a single-stranded oligonucleotide). In some embodiments, a single-stranded RNAi agent oligonucleotide can be or comprise a sense or antisense strand sequence, as described by Sioud 2005 J. Mol. Biol. 348: 1079-1090. In some embodiments, a RNAi agent is a compound capable of directing RNA interference. In some embodiments, a RNAi agent may have a structure or format as is found in “canonical” siRNA structure). In some embodiments, an RNAi agent may have a structure that differs from a “canonical” siRNA structure. To give but a few examples, in some embodiments, an RNAi agent can be longer or shorter than the canonical, can be blunt-ended, and/or can comprise one or more modifications, mismatches, gaps and/or nucleotide replacements. In some embodiments, an RNAi agent contains a 3′-end cap as described in the present disclosure. Without wishing to be bound by any particular theory, Applicant proposes that, in some embodiments, a 3′-end cap can allow both of two functions: (1) allowing RNA interference; and (2) increasing duration of activity and/or biological half-life, which may be accomplished, for example, by increased binding to the PAZ domain of Dicer and/or one or more Ago proteins and/or reducing or preventing degradation of the RNAi agent (e.g., by nucleases such as those in the serum or intestinal fluid). In some embodiments, a RNAi agent of the present disclosure targets (e.g., binds to, anneals to, etc.) a target mRNA. In some embodiments, exposure of a RNAi agent to its target results in a decrease of activity, level and/or expression, e.g., a “knock-down” or “knock-out” of the target. Particularly, in some embodiments, in the case of a disease, disorder and/or condition characterized by over-expression and/or hyper-activity of a target gene, administration of a RNAi agent to a cell, tissue, or subject knocks down the target gene enough to restore a normal level of activity, or to reduce activity to a level that can alleviate, ameliorate, relieve, inhibit, prevent, delay onset of, reduce severity of, and/or reduce incidence of one or more symptoms or features of a disease, disorder, and/or condition of the disease, disorder, and/or condition. In some embodiments, a RNAi agent is double-stranded comprising an antisense strand which is a single-stranded RNAi agent as described herein, which, in combination with a sense strand, can direct RNA interference.

[0166] Single-stranded RNA interference: As used herein, the phrases “single-stranded RNAi” or “single-stranded RNA interference” or the like refer to a process or method of gene silencing directed at least in part by administration of a single-stranded RNAi agent to a system (e.g., cells, tissues, organs, subjects, etc.) where RNAi is to be directed by the agent, and which requires the RISC pathway. The terms may be utilized herein in certain instances to distinguish from “double-stranded RNAi” or “double-stranded RNA interference”, in which a double-stranded RNAi agent is administered to a system, and may be further processed, for example so that one of its two strands is loaded to RISC to, e.g., suppress translation, cleave target RNA, etc.

[0167] Single-stranded RNAi agent: As used herein, the phrase “single-stranded RNAi agent” refers to a single-stranded oligonucleotide that can direct single-stranded RNA interference (RNAi or iRNA) or gene silencing via the RISC pathway. A single-stranded RNAi agent can comprise a polymer of one or more single-stranded nucleotides.

[0168] Subject: As used herein, the term “subject” or “test subject” refers to any organism to which a provided compound or composition is administered in accordance with the present disclosure e.g., for experimental, diagnostic, prophylactic and/or therapeutic purposes. Typical subjects include animals (e.g., mammals such as mice, rats, rabbits, non-human primates, and humans; insects; worms; etc.) and plants. In some embodiments, a subject may be suffering from and/or susceptible to a disease, disorder and/or condition.

[0169] Substantially: As used herein, the term “substantially” refers to the qualitative condition of exhibiting total or near-total extent or degree of a characteristic or property of interest. A base sequence which is substantially complementary to a second sequence is not identical to the second sequence, but is mostly or nearly identical to the second sequence. In addition, one of ordinary skill in the biological arts will understand that biological and chemical phenomena rarely, if ever, go to completion and/or proceed to completeness or achieve or avoid an absolute result. The term “substantially” is therefore used herein to capture the potential lack of completeness inherent in many biological and/or chemical phenomena.

[0170] Suffering from: An individual who is “suffering from” a disease, disorder and/or condition has been diagnosed with and/or displays one or more symptoms of a disease, disorder and/or condition.

[0171] Susceptible to: An individual who is “susceptible to” a disease, disorder and/or condition is one who has a higher risk of developing the disease, disorder and/or condition than does a member of the general public. In some embodiments, an individual who is susceptible to a disease, disorder and/or condition may not have been diagnosed with the disease, disorder and/or condition. In some embodiments, an individual who is susceptible to a disease, disorder and/or condition may exhibit symptoms of the disease, disorder and/or condition. In some embodiments, an individual who is susceptible to a disease, disorder and/or condition may not exhibit symptoms of the disease, disorder and/or condition. In some embodiments, an individual who is susceptible to a disease, disorder, and/or condition will develop the disease, disorder, and/or condition. In some embodiments, an individual who is susceptible to a disease, disorder, and/or condition will not develop the disease, disorder, and/or condition.

[0172] Systemic: The phrases “systemic administration,” “administered systemically,” “peripheral administration,” and “administered peripherally” as used herein have their art-understood meaning referring to administration of a compound or composition such that it enters the recipient's system.

[0173] Therapeutic agent: As used herein, the phrase “therapeutic agent” refers to any agent that, when administered to a subject, has a therapeutic effect and/or elicits a desired biological and/or pharmacological effect. In some embodiments, a therapeutic agent is any substance that can be used to alleviate, ameliorate, relieve, inhibit, prevent, delay onset of, reduce severity of, and/or reduce incidence of one or more symptoms or features of a disease, disorder, and/or condition.

[0174] Therapeutically effective amount: As used herein, the term “therapeutically effective amount” means an amount of a substance (e.g., a therapeutic agent, composition, and/or formulation) that elicits a desired biological response when administered as part of a therapeutic regimen. In some embodiments, a therapeutically effective amount of a substance is an amount that is sufficient, when administered to a subject suffering from or susceptible to a disease, disorder, and/or condition, to treat, diagnose, prevent, and/or delay the onset of the disease, disorder, and/or condition. As will be appreciated by those of ordinary skill in this art, the effective amount of a substance may vary depending on such factors as the desired biological endpoint, the substance to be delivered, the target cell or tissue, etc. For example, the effective amount of compound in a formulation to treat a disease, disorder, and/or condition is the amount that alleviates, ameliorates, relieves, inhibits, prevents, delays onset of, reduces severity of and/or reduces incidence of one or more symptoms or features of the disease, disorder, and/or condition. In some embodiments, a therapeutically effective amount is administered in a single dose; in some embodiments, multiple unit doses are required to deliver a therapeutically effective amount.

[0175] Treat: As used herein, the term “treat,” “treatment,” or “treating” refers to any method used to partially or completely alleviate, ameliorate, relieve, inhibit, prevent, delay onset of, reduce severity of, and/or reduce incidence of one or more symptoms or features of a disease, disorder, and/or condition. Treatment may be administered to a subject who does not exhibit signs of a disease, disorder, and/or condition. In some embodiments, treatment may be administered to a subject who exhibits only early signs of the disease, disorder, and/or condition, for example for the purpose of decreasing the risk of developing pathology associated with the disease, disorder, and/or condition.

[0176] Unsaturated: The term “unsaturated,” as used herein, means that a moiety has one or more units of unsaturation.

[0177] Wild-type: As used herein, the term “wild-type” has its art-understood meaning that refers to an entity having a structure and/or activity as found in nature in a “normal” (as contrasted with mutant, diseased, altered, etc) state or context. Those of ordinary skill in the art will appreciate that wild type genes and polypeptides often exist in multiple different forms (e.g., alleles).

[0178] Nucleic acid: The term “nucleic acid”, as used herein, includes any nucleotides and polymers thereof. The term “polynucleotide”, as used herein, refers to a polymeric form of nucleotides of any length, either ribonucleotides (RNA) or deoxyribonucleotides (DNA). These terms refer to the primary structure of the molecules and, thus, include double- and single-stranded DNA, and double- and single-stranded RNA. These terms include, as equivalents, analogs of either RNA or DNA made from modified nucleotides and/or modified polynucleotides, such as, though not limited to, methylated, protected and/or capped nucleotides or polynucleotides. The terms encompass poly- or oligo-ribonucleotides (RNA) and poly- or oligo-deoxyribonucleotides (DNA); RNA or DNA derived from N-glycosides or C-glycosides of nucleobases and/or modified nucleobases; nucleic acids derived from sugars and/or modified sugars; and nucleic acids derived from phosphate bridges and/or modified internucleotide linkages. The term encompasses nucleic acids containing any combinations of nucleobases, modified nucleobases, sugars, modified sugars, phosphate bridges or modified internucleotidic linkages. Examples include, and are not limited to, nucleic acids containing ribose moieties, nucleic acids containing deoxy-ribose moieties, nucleic acids containing both ribose and deoxyribose moieties, nucleic acids containing ribose and modified ribose moieties. Unless otherwise specified, the prefix poly- refers to a nucleic acid containing 2 to about 10,000 nucleotide monomer units and wherein the prefix oligo- refers to a nucleic acid containing 2 to about 200 nucleotide monomer units.

[0179] Nucleotide: The term “nucleotide” as used herein refers to a monomeric unit of a polynucleotide that consists of a heterocyclic base, a sugar, and one or more internucleotidic linkages. The naturally occurring bases (guanine, (G), adenine, (A), cytosine, (C), thymine, (T), and uracil (U)) are derivatives of purine or pyrimidine, though it should be understood that naturally and non-naturally occurring base analogs are also included. The naturally occurring sugar is the pentose (five-carbon sugar) deoxyribose (which forms DNA) or ribose (which forms RNA), though it should be understood that naturally and non-naturally occurring sugar analogs are also included. Nucleotides are linked via internucleotidic linkages to form nucleic acids, or polynucleotides. Many internucleotidic linkages are known in the art (such as, though not limited to, phosphate, phosphorothioates, boranophosphates and the like). Artificial nucleic acids include PNAs (peptide nucleic acids), phosphotriesters, phosphorothionates, H-phosphonates, phosphoramidates, boranophosphates, methylphosphonates, phosphonoacetates, thiophosphonoacetates and other variants of the phosphate backbone of native nucleic acids, such as those described herein. In some embodiments, a natural nucleotide comprises a naturally occurring base, sugar and internucleotidic linkage. As used herein, the term “nucleotide” also encompasses structural analogs used in lieu of natural or naturally-occurring nucleotides, such as modified nucleotides and nucleotide analogs.

[0180] Modified nucleotide: The term “modified nucleotide” includes any chemical moiety which differs structurally from a natural nucleotide but is capable of performing at least one function of a natural nucleotide. In some embodiments, a modified nucleotide comprises a modification at a sugar, base and/or internucleotidic linkage. In some embodiments, a modified nucleotide comprises a modified sugar, modified nucleobase and/or modified internucleotidic linkage. In some embodiments, a modified nucleotide is capable of at least one function of a nucleotide, e.g., forming a subunit in a polymer capable of base-pairing to a nucleic acid comprising an at least complementary sequence of bases.

[0181] Analog: The term “analog” means any functional analog wherein a chemical moiety which differs structurally from a reference chemical moiety or class of moieties, but which is capable of performing at least one function of such a reference chemical moiety or class of moieties. As non-limiting examples, a nucleotide analog differs structurally from a nucleotide but performs at least one function of a nucleotide; a nucleobase analog differs structurally from a nucleobase but performs at least one function of a nucleobase; etc.

[0182] Nucleoside: The term “nucleoside” refers to a moiety wherein a nucleobase or a modified nucleobase is covalently bound to a sugar or modified sugar.

[0183] Modified nucleoside: The term “modified nucleoside” refers to a moiety derived from or chemically similar to a natural nucleoside, but which comprises a chemical modification which differentiates it from a natural nucleoside. Non-limiting examples of modified nucleosides include those which comprise a modification at the base and/or the sugar. Non-limiting examples of modified nucleosides include those with a 2′ modification at a sugar. Non-limiting examples of modified nucleosides also include abasic nucleosides (which lack a nucleobase). In some embodiments, a modified nucleoside is capable of at least one function of a nucleoside, e.g., forming a moiety in a polymer capable of base-pairing to a nucleic acid comprising an at least complementary sequence of bases.

[0184] Nucleoside analog: The term “nucleoside analog” refers to a chemical moiety which is chemically distinct from a natural nucleoside, but which is capable of performing at least one function of a nucleoside. In some embodiments, a nucleoside analog comprises an analog of a sugar and/or an analog of a nucleobase. In some embodiments, a modified nucleoside is capable of at least one function of a nucleoside, e.g., forming a moiety in a polymer capable of base-pairing to a nucleic acid comprising a complementary sequence of bases.

[0185] Sugar: The term “sugar” refers to a monosaccharide or polysaccharide in closed and/or open form. In some embodiments, sugars are monosaccharides. In some embodiments, sugars are polysaccharides. Sugars include, but are not limited to, ribose, deoxyribose, pentofuranose, pentopyranose, and hexopyranose moieties. As used herein, the term “sugar” also encompasses structural analogs used in lieu of conventional sugar molecules, such as glycol, polymer of which forms the backbone of the nucleic acid analog, glycol nucleic acid (“GNA”), etc. As used herein, the term “sugar” also encompasses structural analogs used in lieu of natural or naturally-occurring nucleotides, such as modified sugars and nucleotide sugars.

[0186] Modified sugar: The term “modified sugar” refers to a moiety that can replace a sugar. A modified sugar mimics the spatial arrangement, electronic properties, or some other physicochemical property of a sugar.

[0187] Nucleobase: The term “nucleobase” refers to the parts of nucleic acids that are involved in the hydrogen-bonding that binds one nucleic acid strand to another complementary strand in a sequence specific manner. The most common naturally-occurring nucleobases are adenine (A), guanine (G), uracil (U), cytosine (C), and thymine (T). In some embodiments, the naturally-occurring nucleobases are modified adenine, guanine, uracil, cytosine, or thymine. In some embodiments, the naturally-occurring nucleobases are methylated adenine, guanine, uracil, cytosine, or thymine. In some embodiments, a nucleobase is a “modified nucleobase,” e.g., a nucleobase other than adenine (A), guanine (G), uracil (U), cytosine (C), and thymine (T). In some embodiments, the modified nucleobases are methylated adenine, guanine, uracil, cytosine, or thymine. In some embodiments, the modified nucleobase mimics the spatial arrangement, electronic properties, or some other physicochemical property of the nucleobase and retains the property of hydrogen-bonding that binds one nucleic acid strand to another in a sequence specific manner. In some embodiments, a modified nucleobase can pair with all of the five naturally occurring bases (uracil, thymine, adenine, cytosine, or guanine) without substantially affecting the melting behavior, recognition by intracellular enzymes or activity of the oligonucleotide duplex. As used herein, the term “nucleobase” also encompasses structural analogs used in lieu of natural or naturally-occurring nucleotides, such as modified nucleobases and nucleobase analogs.

[0188] Modified nucleobase: The terms “modified nucleobase”, “modified base” and the like refer to a chemical moiety which is chemically distinct from a nucleobase, but which is capable of performing at least one function of a nucleobase. In some embodiments, a modified nucleobase is a nucleobase which comprises a modification. In some embodiments, a modified nucleobase is capable of at least one function of a nucleobase, e.g., forming a moiety in a polymer capable of base-pairing to a nucleic acid comprising an at least complementary sequence of bases.

[0189] 3′-end cap: The term “3′-end cap” refers to a non-nucleotidic chemical moiety bound to the 3′-end of an APOC3 oligonucleotide, e.g., a RNAi agent. In some embodiments, a 3′-end cap replaces a 3′-terminal dinucleotide. In some embodiments, a 3′-end cap of an APOC3 oligonucleotide performs at least one of the following functions: allowing RNA interference directed by the oligonucleotide, protecting the oligonucleotide from degradation or reducing the amount or rate of degradation of the oligonucleotide (e.g., by nucleases), reducing the off-target effects of a sense strand, or increasing the activity, duration or efficacy of RNA interference directed by the oligonucleotide. By describing a 3′-end cap as “non-nucleotidic”, it is meant that a 3′-end cap is not a nucleotidic moiety, or oligonucleotide moiety, connected to a sugar moiety of the rest of an APOC3 oligonucleotide as it would do if it is part of an APOC3 oligonucleotide chain. Certain example 3′-end caps are described herein. A person having ordinary skill understands that others 3′-end caps known in the art can be utilized in accordance in the present disclosure.

[0190] Blocking group: The term “blocking group” refers to a group that masks the reactivity of a functional group. The functional group can be subsequently unmasked by removal of the blocking group. In some embodiments, a blocking group is a protecting group.

[0191] Moiety: The term “moiety” refers to a specific segment or functional group of a molecule. Chemical moieties are often recognized chemical entities embedded in or appended to a molecule.

[0192] Solid support: The term “solid support” refers to any support which enables synthesis of nucleic acids. In some embodiments, the term refers to a glass or a polymer, that is insoluble in the media employed in the reaction steps performed to synthesize nucleic acids, and is derivatized to comprise reactive groups. In some embodiments, the solid support is Highly Cross-linked Polystyrene (HCP) or Controlled Pore Glass (CPG). In some embodiments, the solid support is Controlled Pore Glass (CPG). In some embodiments, the solid support is hybrid support of Controlled Pore Glass (CPG) and Highly Cross-linked Polystyrene (HCP).

[0193] Linker or Linking moiety: The terms “linker”, “linking moiety” and the like refer to any chemical moiety which connects one chemical moiety to another. In some embodiments, a linker is a moiety which connects one oligonucleotide to another oligonucleotide in a multimer. In some embodiments, a linker is a moiety optionally positioned between the terminal nucleoside and the solid support or between the terminal nucleoside and another nucleoside, nucleotide, or nucleic acid.

[0194] Gene: The terms “gene,” “recombinant gene” and “gene construct” as used herein, refer to a DNA molecule, or portion of a DNA molecule, that encodes a protein or a portion thereof. The DNA molecule can contain an open reading frame encoding the protein (as exon sequences) and can further include intron sequences. The term “intron” as used herein, refers to a DNA sequence present in a given gene which is not translated into protein and is found in some, but not all cases, between exons. It can be desirable for the gene to be operably linked to, (or it can comprise), one or more promoters, enhancers, repressors and/or other regulatory sequences to modulate the activity or expression of the gene, as is well known in the art.

[0195] Complementary DNA: As used herein, a “complementary DNA” or “CDNA” includes recombinant polynucleotides synthesized by reverse transcription of mRNA and from which intervening sequences (introns) have been removed.

[0196] Oligonucleotide: The term “oligonucleotide” refers to a polymer or oligomer of nucleotides, and may contain any combination of natural and non-natural nucleobases, sugars, and internucleotidic linkages.

[0197] Oligonucleotides can be single-stranded or double-stranded. As used herein, the term “oligonucleotide strand” encompasses a single-stranded oligonucleotide. A single-stranded oligonucleotide can have double-stranded regions (formed by two portions of the single-stranded oligonucleotide) and a double-stranded oligonucleotide, which comprises two oligonucleotide chains, can have single-stranded regions for example, at regions where the two oligonucleotide chains are not complementary to each other. In some embodiments, oligonucleotides are capable of directing a decrease in the expression and/or level of a target gene or its gene product. In some embodiments, oligonucleotides are capable of directing a decrease in the expression and/or level of a target gene or its gene product via RNA interference. In some embodiments, oligonucleotides are capable of directing a decrease in the expression and/or level of a target gene or its gene product via a biochemical mechanism which does not involve RNA interference or RISC (including, but not limited to, RNaseH-mediated knockdown or steric hindrance of gene expression). In some embodiments, oligonucleotides are capable of directing a decrease in the expression and/or level of a target gene or its gene product via RNA interference and/or RNase H-mediated knockdown. Example oligonucleotides include, but are not limited to structural genes, genes including control and termination regions, self-replicating systems such as viral or plasmid DNA, single-stranded and double-stranded RNAi agents and other RNA interference reagents (RNAi agents or iRNA agents), shRNA, antisense oligonucleotides, ribozymes, microRNAs, microRNA mimics, supermirs, aptamers, antimirs, antagomirs, Ul adaptors, triplex-forming oligonucleotides, G-quadruplex oligonucleotides, RNA activators, immuno-stimulatory oligonucleotides, and decoy oligonucleotides.

[0198] Double-stranded and single-stranded oligonucleotides that are effective in inducing RNA interference are also referred to as a RNAi agent or iRNA agent, herein. In some embodiments, these RNA interference inducing oligonucleotides associate with a cytoplasmic multi-protein complex known as RNAi-induced silencing complex (RISC). In many embodiments, double-stranded RNAi agents are sufficiently long that they can be cleaved by an endogenous molecule, e.g., by Dicer, to produce smaller oligonucleotides that can enter the RISC machinery and participate in RISC mediated cleavage and/or translation suppression of a target sequence, e.g. a target mRNA sequence.

[0199] Oligonucleotides of the present disclosure can be of various lengths. In particular embodiments, oligonucleotides can range from about 2 to about 200 nucleotides in length. In various related embodiments, oligonucleotides, single-stranded, double-stranded, and triple-stranded, can range in length from about 4 to about 10 nucleotides, from about 10 to about 50 nucleotides, from about 20 to about 50 nucleotides, from about 15 to about 30 nucleotides, or from about 20 to about 30 nucleotides in length. In some embodiments, an APOC3 oligonucleotide is from about 10 to about 40 nucleotides in length. In some embodiments, an APOC3 oligonucleotide is from about 9 to about 39 nucleotides in length. In some embodiments, the oligonucleotide is at least 4 nucleotides in length. In some embodiments, the oligonucleotide is at least 5 nucleotides in length. In some embodiments, the oligonucleotide is at least 6 nucleotides in length. In some embodiments, the oligonucleotide is at least 7 nucleotides in length. In some embodiments, the oligonucleotide is at least 8 nucleotides in length. In some embodiments, the oligonucleotide is at least 9 nucleotides in length. In some embodiments, the oligonucleotide is at least 10 nucleotides in length. In some embodiments, the oligonucleotide is at least 11 nucleotides in length. In some embodiments, the oligonucleotide is at least 12 nucleotides in length. In some embodiments, the oligonucleotide is at least 15 nucleotides in length. In some embodiments, the oligonucleotide is at least 20 nucleotides in length. In some embodiments, the oligonucleotide is at least 25 nucleotides in length. In some embodiments, the oligonucleotide is at least 30 nucleotides in length. In some embodiments, the oligonucleotide is a duplex of complementary strands of at least 18 nucleotides in length. In some embodiments, the oligonucleotide is a duplex of complementary strands of at least 21 nucleotides in length. In some embodiments, each nucleotide counted in a length independently comprises an optionally substituted nucleobase selected from adenine, cytosine, guanosine, thymine, and uracil.

[0200] Internucleotidic linkage: As used herein, the phrase “internucleotidic linkage” refers generally to a linkage linking nucleoside units of an APOC3 oligonucleotide or a nucleic acid. In some embodiments, an internucleotidic linkage is a phosphodiester linkage, as found in naturally occurring DNA and RNA molecules (natural phosphate linkage). In some embodiments, the term “internucleotidic linkage” includes a modified internucleotidic linkage. In some embodiments, an internucleotidic linkage is a “modified internucleotidic linkage” wherein each oxygen atom of the phosphodiester linkage is optionally and independently replaced by an organic or inorganic moiety. In some embodiments, such an organic or inorganic moiety is selected from but not limited to ═S, ═Se, ═NR′, —SR′, —SeR′, —N(R′)₂, B(R′)₃, —S—, —Se—, and —N(R′)—, wherein each R′ is independently as defined and described in the present disclosure. In some embodiments, an internucleotidic linkage is a phosphotriester linkage, phosphorothioate diester linkage

[chemical structure]

or modified phosphorothioate triester linkage.

[0201] It is understood by a person of ordinary skill in the art that an internucleotidic linkage may exist as an anion or cation at a given pH due to the existence of acid or base moieties in the linkage.

[0202] In some embodiments, “All-(Rp)” or “All-(Sp)” is used to indicate that all chiral linkage phosphorus atoms in oligonucleotide have the same Rp or Sp configuration, respectively.

[0203] Oligonucleotide type: As used herein, the phrase “oligonucleotide type” is used to define an APOC3 oligonucleotide that has a particular base sequence, pattern of backbone linkages (i.e., pattern of internucleotidic linkage types, for example, phosphate, phosphorothioate, etc.), pattern of backbone chiral centers (i.e. pattern of linkage phosphorus stereochemistry (Rp/Sp)), and pattern of backbone phosphorus modifications (e.g., pattern of “—XLR¹” groups in formula I). In some embodiments, oligonucleotides of a common designated “type” are structurally identical to one another.

[0204] One of skill in the art will appreciate that synthetic methods of the present disclosure provide for a degree of control during the synthesis of an APOC3 oligonucleotide strand such that each nucleotide unit of the oligonucleotide strand can be designed and/or selected in advance to have a particular stereochemistry at the linkage phosphorus and/or a particular modification at the linkage phosphorus, and/or a particular base, and/or a particular sugar. In some embodiments, an APOC3 oligonucleotide strand is designed and/or selected in advance to have a particular combination of stereocenters at the linkage phosphorus. In some embodiments, an APOC3 oligonucleotide strand is designed and/or determined to have a particular combination of modifications at the linkage phosphorus. In some embodiments, an APOC3 oligonucleotide strand is designed and/or selected to have a particular combination of bases. In some embodiments, an APOC3 oligonucleotide strand is designed and/or selected to have a particular combination of one or more of the above structural characteristics. In some embodiments, the present disclosure provides compositions comprising or consisting of a plurality of oligonucleotide molecules (e.g., chirally controlled oligonucleotide compositions). In some embodiments, all such molecules are of the same type (i.e., are structurally identical to one another). In many embodiments, however, provided compositions comprise a plurality of oligonucleotides of different types, typically in pre-determined relative amounts.

[0205] Chiral control: As used herein, “chiral control” refers to control of the stereochemical designation of a chiral linkage phosphorus in a chiral internucleotidic linkage within an APOC3 oligonucleotide. In some embodiments, a control is achieved through a chiral element that is absent from the sugar and base moieties of an APOC3 oligonucleotide, for example, in some embodiments, a control is achieved through use of one or more chiral auxiliaries during oligonucleotide preparation as exemplified in the present disclosure, which chiral auxiliaries often are part of chiral phosphoramidites used during oligonucleotide preparation. In contrast to chiral control, a person having ordinary skill in the art appreciates that conventional oligonucleotide synthesis which does not use chiral auxiliaries cannot control stereochemistry at a chiral internucleotidic linkage if such conventional oligonucleotide synthesis is used to form the chiral internucleotidic linkage. In some embodiments, the stereochemical designation of each chiral linkage phosphorus in a chiral internucleotidic linkage within an APOC3 oligonucleotide is controlled.

[0206] Chirally controlled oligonucleotide composition: The terms “chirally controlled oligonucleotide composition”, “chirally controlled nucleic acid composition”, and the like, as used herein, refers to a composition that comprises a plurality of oligonucleotides (or nucleic acids) which share 1) a common base sequence, 2) a common pattern of backbone linkages, and 3) a common pattern of backbone phosphorus modifications, wherein the plurality of oligonucleotides (or nucleic acids) share the same stereochemistry at one or more chiral internucleotidic linkages (chirally controlled internucleotidic linkages), and the level of the plurality of oligonucleotides (or nucleic acids) in the composition is pre-determined (e.g., through chirally controlled oligonucleotide preparation to form one or more chiral internucleotidic linkages). In some embodiments, about 1%-100%, (e.g., about 5%-100%, 10%-100%, 20%-100%, 30%-100%, 40%-100%, 50%-100%, 60%-100%, 70%-100%, 80-100%, 90-100%, 95-100%, 50%-90%, or about 5%, 10%, 20%, 30%, 40%, 50%, 60%, 70%, 80%, 85%, 90%, 91%, 92%, 93%, 94%, 95%, 96%, 97%, 98%, or 99%, or at least 5%, 10%, 20%, 30%, 40%, 50%, 60%, 70%, 80%, 85%, 90%, 91%, 92%, 93%, 94%, 95%, 96%, 97%, 98%, or 99%) of all oligonucleotides in a chirally controlled oligonucleotide composition are oligonucleotides of the plurality. In some embodiments, about 1%-100%, (e.g., about 5%-100%, 10%-100%, 20%-100%, 30%-100%, 40%-100%, 50%-100%, 60%-100%, 70%-100%, 80-100%, 90-100%, 95-100%, 50%-90%, or about 5%, 10%, 20%, 30%, 40%, 50%, 60%, 70%, 80%, 85%, 90%, 91%, 92%, 93%, 94%, 95%, 96%, 97%, 98%, or 99%, or at least 5%, 10%, 20%, 30%, 40%, 50%, 60%, 70%, 80%, 85%, 90%, 91%, 92%, 93%, 94%, 95%, 96%, 97%, 98%, or 99%) of all oligonucleotides in a chirally controlled oligonucleotide composition that share the common base sequence are oligonucleotides of the plurality. In some embodiments, about 1%-100%, (e.g., about 5%-100%, 10%-100%, 20%-100%, 30%-100%, 40%-100%, 50%-100%, 60%-100%, 70%-100%, 80-100%, 90-100%, 95-100%, 50%-90%, or about 5%, 10%, 20%, 30%, 40%, 50%, 60%, 70%, 80%, 85%, 90%, 91%, 92%, 93%, 94%, 95%, 96%, 97%, 98%, or 99%, or at least 5%, 10%, 20%, 30%, 40%, 50%, 60%, 70%, 80%, 85%, 90%, 91%, 92%, 93%, 94%, 95%, 96%, 97%, 98%, or 99%) of all oligonucleotides in a chirally controlled oligonucleotide composition that share the common base sequence, the common pattern of backbone linkages, and the common pattern of backbone phosphorus modifications are oligonucleotides of the plurality. In some embodiments, a predetermined level is be about 1%-100%, (e.g., about 5%-100%, 10%-100%, 20%-100%, 30%-100%, 40%-100%, 50%-100%, 60%-100%, 70%-100%, 80-100%, 90-100%, 95-100%, 50%-90%, or about 5%, 10%, 20%, 30%, 40%, 50%, 60%, 70%, 80%, 85%, 90%, 91%, 92%, 93%, 94%, 95%, 96%, 97%, 98%, or 99%, or at least 50%, 10%, 20%, 30%, 40%, 50%, 60%, 70%, 80%, 85%, 90%, 91%, 92%, 93%, 94%, 95%, 96%, 97%, 98%, or 99%) of all oligonucleotides in a composition, or of all oligonucleotides in a composition that share a common base sequence (e.g., of a plurality of oligonucleotide or an APOC3 oligonucleotide type), or of all oligonucleotides in a composition that share a common base sequence, a common pattern of backbone linkages, and a common pattern of backbone phosphorus modifications are oligonucleotides of the plurality, or of all oligonucleotides in a composition that share a common base sequence, a common patter of base modifications, a common pattern of sugar modifications, a common pattern of internucleotidic linkage types, and/or a common pattern of internucleotidic linkage modifications. In some embodiments, the plurality of oligonucleotides share the same stereochemistry at about 1-50 (e.g., about 1-10, 1-20, 5-10, 5-20, 10-15, 10-20, 10-25, 10-30, or about 1, 2, 3, 4, 5, 6, 7, 8, 9, 10, 11, 12, 13, 14, 15, 16, 17, 18, 19, or 20, or at least 1, 2, 3, 4, 5, 6, 7, 8, 9, 10, 11, 12, 13, 14, 15, 16, 17, 18, 19, or 20) chiral internucleotidic linkages. In some embodiments, the plurality of oligonucleotides share the same stereochemistry at about 1%400% (e.g., about 5%-100%, 10%-100%, 20%-100%, 30%-100%, 40%-100%, 50%-100%, 60%-100%, 70%-100%, 80-100%, 90-100%, 95-100%, 50%-90%, about 5%, 10%, 15%, 20%, 25%, 30%, 35%, 40%, 45%, 50%, 55%, 60%, 65%, 70%, 75%, 80%, 85%, 90%, 95%, or 100%, or at least 5%, 10%, 15%, 20%, 25%, 30%, 350%, 40%, 45%, 50%, 55%, 60%, 65%, 70%, 75%, 80%, 85%, 90%, 95%, or 99%) of chiral internucleotidic linkages. In some embodiments, each chiral internucleotidic linkage is a chiral controlled internucleotidic linkage, and the composition is a completely chirally controlled oligonucleotide composition. In some embodiments, not all chiral internucleotidic linkages are chiral controlled internucleotidic linkages, and the composition is a partially chirally controlled oligonucleotide composition. In some embodiments, a chirally controlled oligonucleotide composition comprises predetermined levels of individual oligonucleotide or nucleic acids types. For instance, in some embodiments a chirally controlled oligonucleotide composition comprises one oligonucleotide type. In some embodiments, a chirally controlled oligonucleotide composition comprises more than one oligonucleotide type. In some embodiments, a chirally controlled oligonucleotide composition comprises multiple oligonucleotide types. In some embodiments, a chirally controlled oligonucleotide composition is a composition of oligonucleotides of a oligonucleotide type, which composition comprises a predetermined level of a plurality of oligonucleotides of the oligonucleotide type.

[0207] Chirally pure: as used herein, the phrase “chirally pure” is used to describe the relative amount of an APOC3 oligonucleotide, e.g., a single-stranded RNAi agent, in which all of the oligonucleotides exist in a single diastereomeric form with respect to the linkage phosphorus.

[0208] Chirally uniform: as used herein, the phrase “chirally uniform” is used to describe an APOC3 oligonucleotide molecule or type in which all nucleotide units have the same stereochemistry at the linkage phosphorus. For instance, an APOC3 oligonucleotide whose nucleotide units all have Rp stereochemistry at the linkage phosphorus is chirally uniform. Likewise, an APOC3 oligonucleotide whose nucleotide units all have Sp stereochemistry at the linkage phosphorus is chirally uniform.

[0209] Predetermined: By predetermined (or pre-determined) is meant deliberately selected, for example as opposed to randomly occurring or achieved without control. Those of ordinary skill in the art, reading the present specification, will appreciate that the present disclosure provides technologies that permit selection of particular chemistry and/or stereochemistry features to be incorporated into oligonucleotide compositions, and further permits controlled preparation of oligonucleotide compositions having such chemistry and/or stereochemistry features. Such provided compositions are “predetermined” as described herein. Compositions that may contain certain oligonucleotides because they happen to have been generated through a process that are not controlled to intentionally generate the particular chemistry and/or stereochemistry features is not a “predetermined” composition. In some embodiments, a predetermined composition is one that can be intentionally reproduced (e.g., through repetition of a controlled process). In some embodiments, a predetermined level of a plurality of oligonucleotides in a composition means that the absolute amount, and/or the relative amount (ratio, percentage, etc.) of the plurality of oligonucleotides in the composition is controlled. In some embodiments, a predetermined level of a plurality of oligonucleotides in a composition is achieved through chirally controlled oligonucleotide preparation.

[0210] Linkage phosphorus: as defined herein, the phrase “linkage phosphorus” is used to indicate that the particular phosphorus atom being referred to is the phosphorus atom present in the internucleotidic linkage, which phosphorus atom corresponds to the phosphorus atom of a phosphodiester of an internucleotidic linkage as occurs in naturally occurring DNA and RNA. In some embodiments, a linkage phosphorus atom is in a modified internucleotidic linkage, wherein each oxygen atom of a phosphodiester linkage is optionally and independently replaced by an organic or inorganic moiety. In some embodiments, a linkage phosphorus atom is P^{L} of Formula I. In some embodiments, a linkage phosphorus atom is chiral.

[0211] P-modification: as used herein, the term “P-modification” refers to any modification at the linkage phosphorus other than a stereochemical modification. In some embodiments, a P-modification comprises addition, substitution, or removal of a pendant moiety covalently attached to a linkage phosphorus. In some embodiments, the “P-modification” is —X-L-R¹ wherein each of X, L and R¹ is independently as defined and described in the present disclosure.

[0212] For purposes of this disclosure, the chemical elements are identified in accordance with the Periodic Table of the Elements, CAS version, Handbook of Chemistry and Physics, 67th Ed., 1986-87, inside cover.

[0213] The methods and structures described herein relating to compounds and compositions of the disclosure also apply to the pharmaceutically acceptable acid or base addition salts and all stereoisomeric forms of these compounds and compositions.

### BRIEF DESCRIPTION OF THE DRAWINGS

[0214] FIG. 1. FIG. 1, including FIG. 1A to 1L, presents cartoons of various ssRNAi formats and hybrid formats.

[0215] FIG. 2. FIG. 2 presents cartoons of various antisense oligonucleotide formats.

[0216] FIG. 3. FIG. 3A shows example multimer formats. Oligonucleotides can be joined directly and/or through linkers. As illustrated, a multimer can comprise oligonucleotide monomers of the same or different structures/types. In some embodiments, a monomer of a multimer is an ssRNAi agent. In some embodiments, a monomer of a multimer is a RNase H-dependent antisense oligonucleotide (ASO). Monomers can be joined through various positions, for example, the 5′-end, the 3′-end, or positions in between. FIG. 3B shows example chemistry approaches for joining monomers, which monomers may perform their functions through various pathways, to form multimers.

### DETAILED DESCRIPTION OF CERTAIN EMBODIMENTS

[0217] Synthetic oligonucleotides provide useful molecular tools in a wide variety of applications. For example, oligonucleotides are useful in therapeutic, diagnostic, research, and new nanomaterials applications. The use of naturally occurring nucleic acids (e.g., unmodified DNA or RNA) is limited, for example, by their susceptibility to endo- and exo-nucleases. As such, various synthetic counterparts have been developed to circumvent these shortcomings. These include synthetic oligonucleotides that contain chemical modifications, e.g., base modifications, sugar modifications, backbone modifications, etc., which, among other things, render these molecules less susceptible to degradation and improve other properties of oligonucleotides. From a structural point of view, modifications to internucleotide phosphate linkages can introduce chirality, and certain properties of oligonucleotides may be affected by configurations of phosphorus atoms that form the backbone of oligonucleotides. For example, in vitro studies have shown that properties of antisense oligonucleotides, such as binding affinity, sequence specific binding to complementary RNA, stability to nucleases, are affected by, inter alia, chirality of backbone phosphorus atoms.

[0218] Among other things, the present disclosure encompasses the recognition that structural elements of oligonucleotides, such as chemical modifications (e.g., modifications of sugar, base, and/or internucleotidic linkages) or patterns thereof, conjugation to lipids or other moieties, and/or stereochemistry [e.g., stereochemistry of backbone chiral centers (chiral internucleotidic linkages), and/or patterns thereof], can have significant impact on properties and activities (e.g., stability, specificity, selectivity, activities to reduce levels of products (transcripts and/or protein) of target genes, etc.). In some embodiments, oligonucleotide properties can be adjusted by optimizing chemical modifications (modifications of base, sugar, and/or internucleotidic linkage moieties), patterns of chemical modifications, stereochemistry and/or patterns of stereochemistry.

[0219] In some embodiments, the present disclosure demonstrates that oligonucleotide compositions comprising oligonucleotides with controlled structural elements, e.g., controlled chemical modifications and/or controlled backbone stereochemistry patterns, provide unexpected properties and activities, including but not limited to those described herein. In some embodiments, provided compositions comprising oligonucleotides having chemical modifications (e.g., base modifications, sugar modification, internucleotidic linkage modifications, etc.) or patterns thereof have improved properties and activities. Non-limiting examples of such improved properties include: directing a decrease in the expression and/or level of a target gene or its gene product; and/or directing RNA interference; and/or directing RNase H-mediated knockdown. In some embodiments, the present disclosure provides technologies (e.g., oligonucleotides, compositions, methods, etc.) for single-stranded RNAi. In some embodiments, a provided oligonucleotide is a ssRNAi agent.

[0220] In some embodiments, RNA interference is reportedly a post-transcriptional, targeted gene-silencing technique that uses an RNAi agent to target a RNA, e.g., a gene transcript such as a messenger RNA (mRNA), comprising a sequence complementary to the RNAi agent, for cleavage mediated by the RISC (RNA-induced silencing complex) pathway. In nature, a type of RNAi reportedly occurs when ribonuclease III (Dicer) cleaves a long dsRNA (double-stranded RNA) (e.g., a foreign dsRNA introduced into a mammalian cell) into shorter fragments called siRNAs. siRNAs (small interfering RNAs or short inhibitory RNAs) are typically about 21 to 23 nucleotides long and comprise about 19 base pair duplexes. The smaller RNA segments then reportedly mediate the degradation of the target mRNA. The RNAi response also reportedly features an endonuclease complex, commonly referred to as an RNA-induced silencing complex (RISC), which directs cleavage of single-stranded mRNA complementary to the antisense strand of the siRNA. Cleavage of the target RNA reportedly takes place in the middle of the region complementary to the antisense strand of the siRNA duplex. The use of the RNAi agent to a target transcript reportedly results in a decrease of gene activity, level and/or expression, e.g., a “knock-down” or “knock-out” of the target gene or target sequence. Artificial siRNAs are useful both as therapeutics and for experimental use.

[0221] In one aspect, an RNA interference agent includes a single stranded RNA that interacts with a target RNA sequence to direct the cleavage of the target RNA. Without wishing to be bound by theory, long double stranded RNA introduced into plants and invertebrate cells is reportedly broken down into siRNA by a Type III endonuclease known as Dicer (Sharp et al., Genes Dev. 2001, 15:485). Dicer, a ribonuclease-III-like enzyme, reportedly processes the dsRNA into 19-23 base pair short interfering RNAs with characteristic two base 3′ overhangs (Bernstein, et al., (2001) Nature 409:363). The siRNAs are reportedly then incorporated into an RNA-induced silencing complex (RISC) where one or more helicases unwind the siRNA duplex, enabling the complementary antisense strand to guide target recognition (Nykanen, et al., (2001) Cell 107:309). Upon binding to the appropriate target mRNA, one or more endonucleases within the RISC cleaves the target to induce silencing (Elbashir, et al., (2001) Genes Dev. 15: 188). Thus, in one aspect the disclosure relates to a single stranded RNA that promotes the formation of a RISC complex to effect silencing of a target gene.

[0222] In some embodiments, a suitable RNAi agent can be selected by any processes known in the art or conceivable by one of ordinary skill in the art in accordance with the present disclosure. For example, the selection criteria can include one or more of the following steps: initial analysis of the target gene sequence and design of RNAi agents; this design can take into consideration sequence similarity across species (human, cynomolgus, mouse, etc.) and dissimilarity to other (non-target) genes; screening of RNAi agents in vitro (e.g., at 10 nM in cells expressing the target transcript); determination of EC50 or IC50 in cells; determination of viability of cells treated with RNAi agents, wherein it is desired, in some embodiments, that the RNAi agent to the target not inhibit the viability of these cells; testing with human PBMC (peripheral blood mononuclear cells), e.g., to test levels of TNF-alpha to estimate immunogenicity, wherein immunostimulatory sequences are usually less desired; testing in human whole blood assay, wherein fresh human blood is treated with an RNAi agent and cytokine/chemokine levels are determined [e.g., TNF-alpha (tumor necrosis factor-alpha) and/or MCP1 (monocyte chemotactic protein 1)], wherein immunostimulatory sequences are usually less desired; determination of gene knockdown in vivo using cells or tumors in test animals; and optimization of specific modifications of the RNAi agents.

[0223] The so-called canonical siRNA structure is reportedly a double-stranded RNA molecule, wherein each strand is about 21 nucleotides long. The two strands are reportedly an antisense (or “guide”) strand, which recognizes and binds to a complementary sequence in the target transcript, and a sense (or “passenger”) strand, which is complementary to the antisense strand. The sense and antisense strands are reportedly largely complementary, typically forming two 3′ overhangs of 2 nucleotides on both ends.

[0224] While a canonical siRNA structure is reportedly double-stranded, RNAi agent can also be single-stranded. In some embodiments, a single-stranded RNAi agent corresponds to an antisense strand of a double-stranded siRNA, and the single-stranded RNAi agent lacks a corresponding passenger strand.

[0225] However, it has been reported that not all tested structural elements for single-stranded RNAi agents are effective; introduction of some structural elements into an APOC3 oligonucleotide can reportedly interference with single-stranded RNA interference activity.

[0226] In some embodiments, the present disclosure provides oligonucleotides and compositions useful as RNAi agent. In some embodiments, the present disclosure provides oligonucleotides and compositions useful as single-stranded RNAi agent. The present disclosure, among other things, provides novel structures of single-stranded oligonucleotides capable of directing RNA interference. Without wishing to be bound by any particular theory, this disclosure notes that single-stranded RNAi agents have advantages over double-stranded RNAi agents. For example, single-stranded RNAi agents have a lower cost of goods, as the construction of only one strand is required. Additionally or alternatively, only one strand (the antisense strand) is administered to target a target transcript. A source of off-target effects directed by dsRNA is loading of the sense strand into RISC and binding to and knockdown of undesired targets (Jackson et al. 2003 Nat. Biotech. 21: 635-637), a single-stranded RNAi agent can elicit fewer off-target effects than a corresponding double-stranded RNAi agent. In addition, some single-stranded RNAi agents, including some disclosed herein, can target particular sequences which have not previously been successfully targeted with double-stranded RNAi agents (for example, they can reduce levels of the sequences, and/or products (transcripts and/or proteins) of the sequences, significantly more than double-stranded RNAi agents). The present disclosure, among other things, provides novel formats (modifications, stereochemistry, combinations thereof, etc.) for oligonucleotides which can direct single-stranded RNA interference.

### Oligonucleotides

[0227] In some embodiments, provided oligonucleotides can direct a decrease in the expression and/or level of a target gene or its gene product. In some embodiments, provided oligonucleotides can direct a decrease in levels of target products. In some embodiments, provided oligonucleotide can reduce levels of transcripts of target genes. In some embodiments, provided oligonucleotide can reduce levels of mRNA of target genes. In some embodiments, provided oligonucleotide can reduce levels of proteins encoded by target genes. In some embodiments, provided oligonucleotides can direct a decrease in the expression and/or level of a target gene or its gene product via RNA interference. In some embodiments, provided oligonucleotides can direct a decrease in the expression and/or level of a target gene or its gene product via a biochemical mechanism which does not involve RNA interference or RISC (including, but not limited to, RNaseH-mediated knockdown or steric hindrance of gene expression). In some embodiments, provided oligonucleotides can direct a decrease in the expression and/or level of a target gene or its gene product via RNA interference and/or RNase H-mediated knockdown. In some embodiments, provided oligonucleotides can direct a decrease in the expression and/or level of a target gene or its gene product by sterically blocking translation after binding to a target gene mRNA, and/or by altering or interfering with mRNA splicing and/or exon inclusion or exclusion. In some embodiments, provided oligonucleotides comprise one or more structural elements described herein or known in the art in accordance with the present disclosure, e.g., base sequences; modifications; stereochemistry; patterns of internucleotidic linkages; patterns of backbone linkages; patterns of backbone chiral centers; patterns of backbone phosphorus modifications; additional chemical moieties, including but not limited to, one or more targeting moieties, lipid moieties, and/or carbohydrate moieties, etc.; seed regions; post-seed regions; 5′-end structures; 5′-end regions; 5′ nucleotide moieties; 3′-end regions; 3′-terminal dinucleotides; 3′-end caps; etc. In some embodiments, a seed region of an APOC3 oligonucleotide is or comprises the second to eighth, second to seventh, second to sixth, third to eighth, third to seventh, third to seven, or fourth to eighth or fourth to seventh nucleotides, counting from the 5′ end; and the post-seed region of the oligonucleotide is the region immediately 3′ to the seed region, and interposed between the seed region and the 3′ end region.

[0228] In some embodiments, a provided composition comprises an APOC3 oligonucleotide. In some embodiments, a provided composition comprises one or more lipid moieties, one or more carbohydrate moieties (unless otherwise specified, other than sugar moieties of nucleoside units that form oligonucleotide chain with internucleotidic linkages), and/or one or more targeting components.

[0229] In some embodiments, a target sequence is a sequence to which an APOC3 oligonucleotide as described herein binds. In many embodiments, a target sequence is identical to, or is an exact complement of, a sequence of a provided oligonucleotide, or of consecutive residues therein (e.g., a provided oligonucleotide includes a target-binding sequence that is identical to, or an exact complement of, a target sequence). In some embodiments, a small number of differences/mismatches is tolerated between (a relevant portion of) an APOC3 oligonucleotide and its target sequence. In many embodiments, a target sequence is present within a target gene. In many embodiments, a target sequence is present within a transcript (e.g., an mRNA and/or a pre-mRNA) produced from a target gene.

[0230] Various linker, lipid moieties, carbohydrate moieties and targeting moieties, including many known in the art, can be utilized in accordance with the present disclosure. In some embodiments, a lipid moiety is a targeting moiety. In some embodiments, a carbohydrate moiety is a targeting moiety. In some embodiments, a targeting moiety is a lipid moiety. In some embodiments, a targeting moiety is a carbohydrate moiety. As readily appreciated by those skilled in the art, various linkers, including those described in the present disclosure, can be utilized in accordance with the present disclosure to link two moieties, for example, a lipid/carbohydrate/targeting component with an APOC3 oligonucleotide moiety. As readily appreciated by those skilled in the art, linkers described for linking two moieties can also be used to link other moieties, for example, linkers for linking a lipid and an APOC3 oligonucleotide moiety can also be used to link a carbohydrate or target moiety with an APOC3 oligonucleotide moiety and vice versa.

[0231] In some embodiments, the present disclosure provides oligonucleotides and oligonucleotide compositions that are chirally controlled. For instance, in some embodiments, a provided composition contains predetermined levels of one or more individual oligonucleotide types, wherein an APOC3 oligonucleotide type is defined by: 1) base sequence; 2) pattern of backbone linkages; 3) pattern of backbone chiral centers; and 4) pattern of backbone P-modifications. In some embodiments, a particular oligonucleotide type may be defined by 1A) base identity; 1B) pattern of base modification; 1C) pattern of sugar modification; 2) pattern of backbone linkages; 3) pattern of backbone chiral centers; and 4) pattern of backbone P-modifications. In some embodiments, oligonucleotides of the same oligonucleotide type are identical. In some embodiments, the present disclosure provides chirally controlled oligonucleotide compositions of oligonucleotides, wherein the composition comprises a predetermined level of a plurality of oligonucleotides, wherein oligonucleotides of the plurality share a common base sequence, and comprise the same configuration of linkage phosphorus at at least 1, 2, 3, 4, 5, 6, 7, 8, 9, 10, 11, 12, 13, 14, 15, 16, 17, 18, 19, 20, 21, 22, 23, 24, or 25 chiral internucleotidic linkages (chirally controlled internucleotidic linkages).

[0232] In some embodiments, provided oligonucleotides comprise 2-30 chirally controlled internucleotidic linkages. In some embodiments, provided oligonucleotides comprise 5-30 chirally controlled internucleotidic linkages. In some embodiments, provided oligonucleotides comprise 10-30 chirally controlled internucleotidic linkages. In some embodiments, provided oligonucleotides comprise 1 chirally controlled internucleotidic linkage. In some embodiments, provided oligonucleotides comprise 2 chirally controlled internucleotidic linkages. In some embodiments, provided oligonucleotides comprise 3 chirally controlled internucleotidic linkages. In some embodiments, provided oligonucleotides comprise 4 chirally controlled internucleotidic linkages. In some embodiments, provided oligonucleotides comprise 5 chirally controlled internucleotidic linkages. In some embodiments, provided oligonucleotides comprise 6 chirally controlled internucleotidic linkages. In some embodiments, provided oligonucleotides comprise 7 chirally controlled internucleotidic linkages. In some embodiments, provided oligonucleotides comprise 8 chirally controlled internucleotidic linkages. In some embodiments, provided oligonucleotides comprise 9 chirally controlled internucleotidic linkages. In some embodiments, provided oligonucleotides comprise 10 chirally controlled internucleotidic linkages. In some embodiments, provided oligonucleotides comprise 11 chirally controlled internucleotidic linkages. In some embodiments, provided oligonucleotides comprise 12 chirally controlled internucleotidic linkages. In some embodiments, provided oligonucleotides comprise 13 chirally controlled internucleotidic linkages. In some embodiments, provided oligonucleotides comprise 14 chirally controlled internucleotidic linkages. In some embodiments, provided oligonucleotides have 15 chirally controlled internucleotidic linkages. In some embodiments, provided oligonucleotides have 16 chirally controlled internucleotidic linkages. In some embodiments, provided oligonucleotides have 17 chirally controlled internucleotidic linkages. In some embodiments, provided oligonucleotides have 18 chirally controlled internucleotidic linkages. In some embodiments, provided oligonucleotides have 19 chirally controlled internucleotidic linkages. In some embodiments, provided oligonucleotides have 20 chirally controlled internucleotidic linkages.

[0233] In some embodiments, a provided oligonucleotide is a unimer. In some embodiments, a provided oligonucleotide is a P-modification unimer. In some embodiments, a provided oligonucleotide is a stereounimer. In some embodiments, a provided oligonucleotide is a stereounimer of configuration Rp. In some embodiments, a provided oligonucleotide is a stereounimer of configuration Sp.

[0234] In some embodiments, a provided oligonucleotide is an altmer. In some embodiments, a provided oligonucleotide is a P-modification altmer. In some embodiments, a provided oligonucleotide is a stereoaltmer.

[0235] In some embodiments, a provided oligonucleotide is a blockmer. In some embodiments, a provided oligonucleotide is a P-modification blockmer. In some embodiments, a provided oligonucleotide is a stereoblockmer.

[0236] In some embodiments, a provided oligonucleotide is a gapmer.

[0237] In some embodiments, a provided oligonucleotide is a skipmer.

[0238] In some embodiments, a provided oligonucleotide is a hemimer. In some embodiments, a hemimer is an APOC3 oligonucleotide wherein the 5′-end or the 3′-end region has a sequence that possesses a structure feature that the rest of the oligonucleotide does not have. In some embodiments, the 5′-end or the 3′-end region has or comprises 2 to 20 nucleotides. In some embodiments, a structural feature is a base modification. In some embodiments, a structural feature is a sugar modification. In some embodiments, a structural feature is a P-modification. In some embodiments, a structural feature is stereochemistry of the chiral internucleotidic linkage. In some embodiments, a structural feature is or comprises a base modification, a sugar modification, a P-modification, or stereochemistry of the chiral internucleotidic linkage, or combinations thereof. In some embodiments, a hemimer is an APOC3 oligonucleotide in which each sugar moiety of the 5′-end region shares a common modification. In some embodiments, a hemimer is an APOC3 oligonucleotide in which each sugar moiety of the 3′-end region shares a common modification. In some embodiments, a common sugar modification of the 5′ or 3′-end region is not shared by any other sugar moieties in the oligonucleotide. In some embodiments, an example hemimer is an APOC3 oligonucleotide comprising a sequence of substituted or unsubstituted 2′-O-alkyl sugar modified nucleosides, bicyclic sugar modified nucleosides, β-D-ribonucleosides or β-D-deoxyribonucleosides (for example 2′-MOE modified nucleosides, and LNA™ or ENA™ bicyclic sugar modified nucleosides) at one terminus region and a sequence of nucleosides with a different sugar moiety (such as a substituted or unsubstituted 2′-O-alkyl sugar modified nucleosides, bicyclic sugar modified nucleosides or natural ones) at the other terminus region. In some embodiments, a provided oligonucleotide is a combination of one or more of unimer, altmer, blockmer, gapmer, hemimer and skipmer. In some embodiments, a provided oligonucleotide is a combination of one or more of unimer, altmer, blockmer, gapmer, and skipmer. For instance, in some embodiments, a provided oligonucleotide is both an altmer and a gapmer. In some embodiments, a provided nucleotide is both a gapmer and a skipmer. One of skill in the chemical and synthetic arts will recognize that numerous other combinations of patterns are available and are limited only by the commercial availability and/or synthetic accessibility of constituent parts required to synthesize a provided oligonucleotide in accordance with methods of the present disclosure. In some embodiments, a hemimer structure provides advantageous benefits. In some embodiments, provided oligonucleotides are 5′-hemimers that comprises modified sugar moieties in a 5′-end sequence. In some embodiments, provided oligonucleotides are 5′-hemimers that comprises modified 2′-sugar moieties in a 5′-end sequence.

[0239] In some embodiments, a provided oligonucleotide comprises one or more optionally substituted nucleotides. In some embodiments, a provided oligonucleotide comprises one or more modified nucleotides. In some embodiments, a provided oligonucleotide comprises one or more optionally substituted nucleosides. In some embodiments, a provided oligonucleotide comprises one or more modified nucleosides. In some embodiments, a provided oligonucleotide comprises one or more optionally substituted LNAs.

[0240] In some embodiments, a provided oligonucleotide comprises one or more optionally substituted nucleobases. In some embodiments, a provided oligonucleotide comprises one or more optionally substituted natural nucleobases. In some embodiments, a provided oligonucleotide comprises one or more optionally substituted modified nucleobases. In some embodiments, a provided oligonucleotide comprises one or more 5-methylcytidine; 5-hydroxymethylcytidine, 5-formylcytosine, or 5-carboxylcytosine. In some embodiments, a provided oligonucleotide comprises one or more 5-methylcytidine.

[0241] In some embodiments, each base (BA) is independently an optionally substituted or protected nucleobase of adenine, cytosine, guanosine, thymine, or uracil. As appreciated by those skilled in the art, various protected nucleobases, including those widely known in the art, for example, those used in oligonucleotide preparation (e.g., protected nucleobases of WO/2010/064146, WO/2011/005761, WO/2013/012758, WO/2014/010250, US2013/0178612, WO/2014/012081, WO/2015/107425, WO2017/015555, and WO2017/062862, protected nucleobases of each of which are incorporated herein by reference), and can be utilized in accordance with the present disclosure.

[0242] In some embodiments, a provided oligonucleotide comprises one or more optionally substituted sugars. In some embodiments, a provided oligonucleotide comprises one or more optionally substituted sugars found in naturally occurring DNA and RNA. In some embodiments, a provided oligonucleotide comprises one or more optionally substituted ribose or deoxyribose. In some embodiments, a provided oligonucleotide comprises one or more optionally substituted ribose or deoxyribose, wherein one or more hydroxyl groups of the ribose or deoxyribose moiety is optionally and independently replaced by halogen, R′, —N(R′)₂, —OR′, or —SR′, wherein each R′ is independently as defined above and described herein. In some embodiments, a provided oligonucleotide comprises one or more optionally substituted deoxyribose, wherein the 2′ position of the deoxyribose is optionally and independently substituted with halogen, R′, —N(R′)₂, —OR′, or —SR′, wherein each R′ is independently as defined above and described herein. In some embodiments, a provided oligonucleotide comprises one or more optionally substituted deoxyribose, wherein the 2′ position of the deoxyribose is optionally and independently substituted with halogen. In some embodiments, a provided oligonucleotide comprises one or more optionally substituted deoxyribose, wherein the 2′ position of the deoxyribose is optionally and independently substituted with one or more —F. halogen. In some embodiments, a provided oligonucleotide comprises one or more optionally substituted deoxyribose, wherein the 2′ position of the deoxyribose is optionally and independently substituted with —OR′, wherein each R′ is independently as defined above and described herein. In some embodiments, a provided oligonucleotide comprises one or more optionally substituted deoxyribose, wherein the 2′ position of the deoxyribose is optionally and independently substituted with —OR′, wherein each R′ is independently an optionally substituted C₁-C₆ aliphatic. In some embodiments, a provided oligonucleotide comprises one or more optionally substituted deoxyribose, wherein the 2′ position of the deoxyribose is optionally and independently substituted with —OR′, wherein each R′ is independently an optionally substituted C₁-C₆ alkyl. In some embodiments, a provided oligonucleotide comprises one or more optionally substituted deoxyribose, wherein the 2′ position of the deoxyribose is optionally and independently substituted with —OMe. In some embodiments, a provided oligonucleotide comprises one or more optionally substituted deoxyribose, wherein the 2′ position of the deoxyribose is optionally and independently substituted with —O— methoxyethyl.

[0243] In some embodiments, a provided oligonucleotide is a hybridized oligonucleotide strand. In certain embodiments, a provided oligonucleotide is a partially hybridized oligonucleotide strand. In certain embodiments, a provided oligonucleotide is a completely hybridized oligonucleotide strand. In certain embodiments, a provided oligonucleotide is a double-stranded oligonucleotide. In certain embodiments, a provided oligonucleotide is a triple-stranded oligonucleotide (e.g., a triplex).

[0244] In some embodiments, any one of the structures comprising an APOC3 oligonucleotide depicted in WO2012/030683 can be modified in accordance with methods of the present disclosure to provide chirally controlled compositions thereof. For example, in some embodiments, chirally controlled composition comprises a stereochemical control at any one or more of chiral linkage phosphorus atoms, optionally through incorporation of one or more P-modifications described in WO2012/030683 or the present disclosure. For example, in some embodiments, a particular nucleotide unit of an APOC3 oligonucleotide of WO2012/030683 is preselected to be provided with chiral control at the linkage phosphorus of that nucleotide unit and/or to be P-modified with chiral control at the linkage phosphorus of that nucleotide unit.

[0245] In some embodiments, a provided oligonucleotide comprises a nucleic acid analog, e.g., GNA, LNA, PNA, TNA, F-HNA (F-THP or 3′-fluoro tetrahydropyran), MNA (mannitol nucleic acid, e.g., Leumann 2002 Bioorg. Med. Chem. 10: 841-854), ANA (anitol nucleic acid), and Morpholino.

[0246] In some embodiments, a provided oligonucleotide is characterized as having the ability to indirectly or directly increase or decrease activity of a protein or inhibition or promotion of the expression of a protein. In some embodiments, a provided oligonucleotide is characterized in that it is useful in the control of cell proliferation, viral replication, and/or any other cell signaling process.

[0247] In some embodiments, the 5′-end and/or the 3′-end of a provided oligonucleotide is modified. In some embodiments, the 5′-end and/or the 3′-end of a provided oligonucleotide is modified with a terminal cap moiety. Examples of such modifications, including terminal cap moieties are extensively described herein and in the art, for example but not limited to those described in US Patent Application Publication US 2009/0023675A1.

[0248] In some embodiments, oligonucleotides of an APOC3 oligonucleotide type characterized by 1) a common base sequence and length, 2) a common pattern of backbone linkages, and 3) a common pattern of backbone chiral centers, have the same chemical structure. For example, they have the same base sequence, the same pattern of nucleoside modifications, the same pattern of backbone linkages (i.e., pattern of internucleotidic linkage types, for example, phosphate, phosphorothioate, etc), the same pattern of backbone chiral centers (i.e. pattern of linkage phosphorus stereochemistry (Rp/Sp)), and the same pattern of backbone phosphorus modifications (e.g., pattern of “—XLR¹” groups in Formula I).

[0249] Single-Stranded RNAi Agents and Antisense Oligonucleotides

[0250] In some embodiments, the present disclosure provides oligonucleotides. In some embodiments, the present disclosure provides oligonucleotides which decrease the expression and/or level of a target gene or its gene product. Those of ordinary skill in the art, reading the present disclosure, will appreciate that, in some embodiments, provided oligonucleotides may act as RNAi agents. Alternatively or additionally, in some embodiments, provided oligonucleotides may act via an RNase H-dependent mechanism and/or another biochemical mechanism that does not involve RNA interference.

[0251] Among other things, the present disclosure defines certain structural attributes that may be particularly desirable and/or effective in an APOC3 oligonucleotide. Among other things, the present disclosure defines certain structural attributes that may be particularly desirable and/or effective in an APOC3 oligonucleotide that acts as an RNAi agent. In some embodiments, the present disclosure defines certain structural attributes that may be particularly desirable and/or effective in an APOC3 oligonucleotide that acts via an RNase H-dependent mechanism and/or other biochemical mechanism. In some embodiments, the present disclosure defines certain structural attributes that may be particularly desirable and/or effective in a single-stranded ssRNAi agent (ssRNAi or ssRNAi agent); in some such embodiments, as described further herein below, such structural attributes may be distinct from those that are particularly desirable and/or effective in a corresponding strand of a double-stranded RNAi agent (dsRNAi or dsRNAi agent). In some embodiments, provided oligonucleotides are single-stranded RNAi agents (e.g., which can be loaded into RISC and/or can direct or enhance RISC-mediated target). In some embodiments, provided oligonucleotides are antisense oligonucleotides (e.g., which can be loaded into RNase H and/or direct or enhance RNase-H-mediated cleavage of a target and/or operate via a different biochemical mechanism).

[0252] In some embodiments (including in some single-stranded oligonucleotide embodiments), oligonucleotides that act as RNAi agents may have one or more different structural attributes and/or functional properties from those oligonucleotides that act via an RNase H-dependent mechanism. In some embodiments, an APOC3 oligonucleotide can direct a decrease in the expression and/or level of a target gene or its gene product by sterically blocking translation after binding to a target gene mRNA, and/or by altering or interfering with mRNA splicing and/or exon inclusion or exclusion (e.g., skipping). In some embodiments, an APOC3 oligonucleotide can perform a function, or a significant percentage of a function (for example, 10-100%, no less than 10%, 20%, 30%, 40%, 50%, 60%, 70%, 80%, 90% percent or more) independent of RNA interference or RISC.

[0253] In some embodiments, a provided oligonucleotide is an antisense oligonucleotide (ASO) which directs cleavage of a target RNA mediated by RNase H and not RISC (RNA interference silencing complex).

[0254] In some embodiments, a provided oligonucleotide is a single-stranded RNAi (ssRNAi) agent which directs cleavage of a target mRNA mediated by the RISC (RNA interference silencing complex) and not the enzyme RNase H. In some embodiments, an APOC3 oligonucleotide can perform a function, or a significant percentage of a function (for example, 10-100%, no less than 10%, 20%, 30%, 40%, 50%, 60%, 70%, 80%, 90% percent or more) independent of RNase H.

[0255] A double-stranded RNAi agent can also direct cleavage of a target mRNA using RISC and not the enzyme RNase H. In some embodiments, a single-stranded RNAi agent differs from a double-stranded RNAi agent in that a ssRNAi agent includes only a single oligonucleotide strand and generally does not comprise a double-stranded region of significant length, and a dsRNAi agent comprises a double stranded region of significant length (e.g., at least about 15 bp, or about 19 bp in a “canonical” siRNA). In some embodiments, a dsRNAi comprises two separate, complementary strands (which are not covalently linked) which form a double-stranded region (e.g., in a “canonical” siRNA), or a long single strand which comprises two complementary sequences which together form a double-stranded region (e.g., in a shRNA or short hairpin RNA). In some embodiments of a dsRNAi, the passenger strand has a single-stranded nick, forming two strands. In some embodiments, the present disclosure demonstrates that sequences and/or structural elements (chemical modifications, stereochemistry, etc.) required for efficacious single-stranded RNAi agents may differ from those required for efficacious double-stranded RNAi agents.

[0256] Among other things, the present disclosure encompasses the recognition that certain designs (e.g., sequences and/or structural elements) which may be suitable for double-stranded RNAi agents may not be suitable for single-stranded RNAi agents (including single-stranded RNAi agents of provided formats described herein), and vice versa. In some embodiments, the present disclosure provides designs for effective ssRNAi. In some embodiments, the present disclosure demonstrates that certain base sequences, when combined with structural elements (modifications, stereochemistry, additional chemical moiety or moieties, etc.) in accordance with the present disclosure, can provided oligonucleotides having unexpectedly high activities, for example, when administered as ssRNAi agents, particularly in comparison with oligonucleotides comprising the same sequences but double-stranded and administered as dsRNAi agents. In some embodiments, the present disclosure demonstrates that certain base sequences, when combined with structural elements (modifications, stereochemistry, additional chemical moiety or moieties, etc.) in accordance with the present disclosure, can provided oligonucleotides having unexpectedly high activities, for example, the ability to decrease the expression and/or level of a target gene or its gene product.

[0257] Structural and Functional Differences Between Single-Stranded RNAi (ssRNAi) Agents, Double-Stranded RNAi (dsRNAi) Agents, and RNase H-Dependent Antisense Oligonucleotides (ASOs)

[0258] In some embodiments, single-stranded RNAi (ssRNAi) agents, double-stranded RNAi (dsRNAi) agents and RNase H-dependent antisense oligonucleotides (ASOs) all involve binding of an agent or oligonucleotide (or portion thereof) to a complementary (or substantially complementary) target RNA (e.g., a mRNA or pre-mRNA), followed by cleavage of the target RNA and/or a decrease the expression and/or level of a target gene or its gene product. In some embodiments, RNAi agents, whether double- or single-stranded, employ the RISC, or RNA interference silencing complex, which includes the enzyme Ago-2 (Argonaute-2). In some embodiments, RNase H-dependent antisense oligonucleotides are single-stranded and employ a different enzyme, RNase H. RNAse H is reportedly a cellular endonuclease which cleaves the RNA strand of an RNA:DNA duplex; see U.S. Pat. No. 7,919,472. See also, Saetrom (2004 Bioinformatics 20: 3055-3063); Kretschmer-Kazemi Far et al. (2003 Nucleic Acids 31: 4417-4424); Bertrand et al. (2002) Biochem. Biophys. Res. Comm. 296: 1000-1004); Vickers et al. (2003 J. Biol. Chem. 278: 7108). In some embodiments, oligonucleotides that can direct RNase H-mediated knockdown include, but are not limited to, those consisting of or comprising a region of consecutive 2′-deoxy nucleotide units which contain no 2′-modifications. In some embodiments, oligonucleotides that can direct RNase H-mediated knockdown are gap-widened oligonucleotides or gapmers. In some embodiments, a gapmer comprises an internal region comprises a plurality of nucleotides that supports RNase H cleavage and is positioned between external regions having a plurality of nucleotides that are chemically distinct from the nucleosides of the internal region. In some embodiments, a gapmer comprise a span of 2′-deoxy nucleotides containing no 2′-modifications, flanked or adjacent to one or two wings. In some embodiments, a gap directs RNase H cleavage of the corresponding RNA target. In some embodiments, the wings do not direct or act as substrates for RNase H cleavage. The wings can be of varying lengths (including, but not limited to, 1 to 8 nt) and can comprise various modifications or analogs (including, but not limited to, 2′-modifications, including, but not limited to, 2′-OMe and 2′-MOE). See, as non-limiting examples, U.S. Pat. Nos. 9,550,988; 7,919,472; 5,013,830; 5,149,797; 5,220,007; 5,256,775; 5,366,878; 5,403,711; 5,491,133; 5,565,350; 5,623,065; 5,652,355; 5,652,356; and 5,700,922. In some embodiments, presence of one or more such modifications or analogs may correlate with modified (e.g., increased, reduced, or altered) RNase H cleavage of a target.

[0259] In some embodiments, double-stranded RNAi agents, even the antisense strand thereof, differ structurally from a RNase H-dependent antisense oligonucleotide. In some embodiments, RNase H-dependent antisense oligonucleotides and siRNA oligonucleotides seem to have completely opposite characteristics, both regarding 5′-end structures and overall duplex stability.

[0260] Double-stranded RNAi agents can reportedly be naturally-produced in a cell by the Dicer enzyme, which cleaves larger RNA molecules, such as double-stranded RNA from invading viruses, into a dsRNA. The canonical structure of a dsRNA agent comprises two strands of RNA, each about 19 to 23 nt long, which are annealed to form an about 19-21 bp double-stranded region and two 3′ dinucleotide overhangs. For a double-stranded RNAi agent, the sense strand is reportedly unwound from the duplex before the antisense strand is incorporated into RISC. Aside from the natural separation of a double-stranded RNAi agent into antisense and sense strands, single-stranded RNAi agents have not been reported to be naturally produced in a human cell.

[0261] Among other things, the present disclosure provides the teaching that, in many cases, a single-stranded RNAi agent is not simply an isolated antisense strand of a double-stranded RNAi agent in that, for example, an antisense strand of an effective dsRNAi agent may be much less effective than the dsRNAi agent, and a ssRNAi agent, when formulated as a dsRNAi agent (for example, by annealing with a sense strand), may be much less effective than the ssRNAi agent. In some embodiments, double-stranded and single-stranded RNAi agents differ in many significant ways. Structural parameters of double-stranded RNAi agents are not necessarily reflected in single-stranded RNAi agents.

[0262] In some embodiments, the present disclosure teaches that target sequences which are suitable for double-stranded RNAi agents may not be suitable for single-stranded RNAi agents, and vice versa. For example, in at least some cases, single-stranded versions of double-stranded RNAi agents may not be efficacious. As a non-limiting example, Table 46A shows that several ssRNAi agents were constructed with sequences derived from dsRNAi. These ssRNAi based on dsRNAi were generally less efficacious than the corresponding dsRNAi.

[0263] In some embodiments, double-stranded and single-stranded RNAi agents also differ in their sensitivity to incorporation of chirally controlled internucleotidic linkages. For example, Matranga et al. (2005 Cell 123: 607-620) reported that introduction of a single Sp internucleotidic linkage (e.g., a single Sp PS) into the sense strand of a double-stranded RNAi agent greatly decreased RISC assembly and RNA interference activity. In contrast, in some embodiments, data shown herein demonstrate that, surprisingly, incorporation of a Sp internucleotidic linkage)(e.g., Sp PS) can perform two functions for a single-stranded RNAi agent: (a) it increases stability against nucleases; and (b) does not interfere with RNA interference activity. Many example oligonucleotides can perform as efficacious single-stranded RNAi agents comprising one or more chirally controlled internucleotidic linkages (e.g., Sp internucleotidic linkages, or Sp PS (phosphorothioate) are shown herein).

[0264] Alternatively or additionally, double-stranded and single-stranded RNAi agents can differ in immunogenicity. In some embodiments, some single-stranded RNAi agents are reportedly more immunogenic than double-stranded RNAi agents. Sioud J. Mol. Biol. (2005) 348, 1079-1090. In some embodiments, several double-stranded RNAi agents reportedly did not induce an immune response, whereas corresponding single-stranded RNAi agents did. In some embodiments, the present disclosure provides oligonucleotides with low immunogenicity. In some embodiments, such oligonucleotides can be utilized as ssRNAi reagent.

[0265] Among other things, the present disclosure encompasses the recognition that certain conventional designs of single-stranded RNAi agents, which derive single-stranded RNAi agents, including base sequences, from double-stranded RNAi agents, often fail to provide effective single-stranded RNAi agents. In some embodiments, the present disclosure demonstrates that, surprisingly, ssRNAi agents derived from base sequences of effective RNase H-dependent ASOs can produce efficacious ssRNAi agents (see Table 46A).

[0266] In some embodiments, the present disclosure provides oligonucleotides which can be utilized as efficacious RNase-H dependent ASOs, which comprise regions of 2′-deoxy nucleotides without 2′-modifications, and which are complementary or substantially complementary to RNA sequences or portions thereof. In some embodiments, a region can be, for example, a core sequence of about 10 nt flanked on one or both sides by wings, wherein the wings differ from the core in chemistry and can comprise, as non-limiting examples, 2′-modifications or internucleotidic linkage modifications.

[0267] Oligonucleotides

[0268] In some embodiments, provided oligonucleotides can direct a decrease in the expression and/or level of a target gene or its gene product. In some embodiments, provided oligonucleotides can direct a decrease in the expression and/or level of a target gene or its gene product via RNA interference. In some embodiments, provided oligonucleotides can direct a decrease in the expression and/or level of a target gene or its gene product via a biochemical mechanism which does not involve RNA interference or RISC (including, but not limited to, RNaseH-mediated knockdown or steric hindrance of gene expression). In some embodiments, provided oligonucleotides can direct a decrease in the expression and/or level of a target gene or its gene product via RNA interference and/or RNase H-mediated knockdown. In some embodiments, provided oligonucleotides can direct a decrease in the expression and/or level of a target gene or its gene product by sterically blocking translation after binding to a target gene mRNA, and/or by altering or interfering with mRNA splicing and/or exon inclusion or exclusion.

[0269] In some embodiments, a provided oligonucleotide has a structural element or format or portion thereof described herein.

[0270] In some embodiments, a provided oligonucleotide capable of directing a decrease in the expression and/or level of a target gene or its gene product has a structural element or format or portion thereof described herein.

[0271] In some embodiments, a provided oligonucleotide capable of directing a decrease in the expression and/or level of a target gene or its gene product has the format of any oligonucleotide disclosed herein, e.g., in Table 1A, or in the Figures or Tables, or otherwise disclosed herein.

[0272] In some embodiments, a provided oligonucleotide has any of Formats illustrated in FIG. 1.

[0273] The present disclosure presents data showing that various oligonucleotides of various formats are capable of directing a decrease in the expression and/or level of a target gene or its gene product targeted against any of multiple different sequences, in multiple different genes, in multiple different species; additional data was generated supporting the efficacy of ssRNAi agents of the disclosed Formats and not shown.

[0274] In some embodiments, a provided oligonucleotide capable of directing RNase H-mediated knockdown has a structural element or format or portion thereof described herein.

[0275] In some embodiments, a provided oligonucleotide capable of directing RNase H-mediated knockdown has the format of any oligonucleotide disclosed herein, e.g., in Table 1A or in the Figures or Tables, or otherwise disclosed herein.

[0276] In some embodiments, a provided oligonucleotide has any of Formats illustrated in FIG. 1.

[0277] The present disclosure presents data showing that various oligonucleotides of various formats are capable of directing RNase H-mediated knockdown against any of multiple different sequences, in multiple different genes, in multiple different species; additional data was generated supporting the efficacy of ssRNAi agents of the disclosed Formats and not shown.

[0278] In some embodiments, a provided oligonucleotide capable of directing single-stranded RNA interference has a structural element or format or portion thereof described herein.

[0279] In some embodiments, a provided oligonucleotide capable of directing single-stranded RNA interference has the format of any oligonucleotide disclosed herein, e.g., in Table 1A or in the Figures or Tables, or otherwise disclosed herein.

[0280] In some embodiments, a provided single-stranded RNAi agent has any of the Formats illustrated in FIG. 1.

[0281] The present disclosure presents data showing that various RNAi agents of various formats are capable of directing RNA interference against any of multiple different sequences, in any of multiple different genes; additional data was generated supporting the efficacy of ssRNAi agents of the disclosed Formats and not shown.

[0282] In some embodiments, a target of RNAi is a transcript. In some embodiments, a transcript is pre-mRNA. In some embodiments, a transcript is mature RNA. In some embodiments, a transcript is mRNA. In some embodiments, a transcript comprises a mutation. In some embodiments, a mutation is a frameshift. In some embodiments, a transcript comprises a premature termination codon. In some embodiments, a target of RNAi is a RNA which is not a mRNA. In some embodiments, a target of RNAi is a non-coding RNA. In some embodiments, a target of RNAi is a long non-coding RNA. In some embodiments, provided oligonucleotides in provided compositions, e.g., oligonucleotides of a first plurality, comprise base modifications, sugar modifications, and/or internucleotidic linkage modifications. In some embodiments, provided oligonucleotides comprise base modifications and sugar modifications. In some embodiments, provided oligonucleotides comprise base modifications and internucleotidic linkage modifications. In some embodiments, provided oligonucleotides comprise sugar modifications and internucleotidic modifications. In some embodiments, provided compositions comprise base modifications, sugar modifications, and internucleotidic linkage modifications. Example chemical modifications, such as base modifications, sugar modifications, internucleotidic linkage modifications, etc. are widely known in the art including but not limited to those described in this disclosure. In some embodiments, a modified base is substituted A, T, C, G or U. In some embodiments, a sugar modification is 2′-modification. In some embodiments, a 2′-modification is 2-F modification. In some embodiments, a 2′-modification is 2′-OR¹. In some embodiments, a 2′-modification is 2′-OR¹, wherein R¹ is optionally substituted alkyl. In some embodiments, a 2′-modification is 2′-OMe. In some embodiments, a 2′-modification is 2′-MOE. In some embodiments, a modified sugar moiety is a bridged bicyclic or polycyclic ring. In some embodiments, a modified sugar moiety is a bridged bicyclic or polycyclic ring having 5-20 ring atoms wherein one or more ring atoms are optionally and independently heteroatoms. Example ring structures are widely known in the art, such as those found in BNA, LNA, etc. In some embodiments, provided oligonucleotides comprise both one or more modified internucleotidic linkages and one or more natural phosphate linkages. In some embodiments, oligonucleotides comprising both modified internucleotidic linkage and natural phosphate linkage and compositions thereof provide improved properties, e.g., activities, etc. In some embodiments, a modified internucleotidic linkage is a chiral internucleotidic linkage. In some embodiments, a modified internucleotidic linkage is a phosphorothioate linkage. In some embodiments, a modified internucleotidic linkage is a substituted phosphorothioate linkage.

[0283] Among other things, the present disclosure encompasses the recognition that stereorandom oligonucleotide preparations contain a plurality of distinct chemical entities that differ from one another, e.g., in the stereochemical structure of individual backbone chiral centers within the oligonucleotide chain. Without control of stereochemistry of backbone chiral centers, stereorandom oligonucleotide preparations provide uncontrolled compositions comprising undetermined levels of oligonucleotide stereoisomers. Even though these stereoisomers may have the same base sequence, they are different chemical entities at least due to their different backbone stereochemistry, and they can have, as demonstrated herein, different properties, e.g., activities, etc. Among other things, the present disclosure provides new compositions that are or contain particular stereoisomers of oligonucleotides of interest. In some embodiments, a particular stereoisomer may be defined, for example, by its base sequence, its length, its pattern of backbone linkages, and its pattern of backbone chiral centers. As is understood in the art, in some embodiments, base sequence may refer to the identity and/or modification status of nucleoside residues (e.g., of sugar and/or base components, relative to standard naturally occurring nucleotides such as adenine, cytosine, guanosine, thymine, and uracil) in an APOC3 oligonucleotide and/or to the hybridization character (i.e., the ability to hybridize with particular complementary residues) of such residues. In some embodiments, the present disclosure provide an APOC3 oligonucleotide composition comprising a predetermined level of oligonucleotides of an individual oligonucleotide type which are chemically identical, e.g. they have the same base sequence, the same pattern of nucleoside modifications (modifications to sugar and base moieties, if any), the same pattern of backbone chiral centers, and the same pattern of backbone phosphorus modifications. The present disclosure demonstrates, among other things, that individual stereoisomers of a particular oligonucleotide can show different stability and/or activity from each other. In some embodiments, property improvements achieved through inclusion and/or location of particular chiral structures within an APOC3 oligonucleotide can be comparable to, or even better than those achieved through use of particular backbone linkages, residue modifications, etc. (e.g., through use of certain types of modified phosphates [e.g., phosphorothioate, substituted phosphorothioate, etc.], sugar modifications [e.g., 2′-modifications, etc.], and/or base modifications [e.g., methylation, etc.]). Among other things, the present disclosure recognizes that, in some embodiments, properties (e.g., activities, etc.) of an APOC3 oligonucleotide can be adjusted by optimizing its pattern of backbone chiral centers, optionally in combination with adjustment/optimization of one or more other features (e.g., linkage pattern, nucleoside modification pattern, etc.) of the oligonucleotide. As exemplified by various examples in the present disclosure, provided chirally controlled oligonucleotide compositions can demonstrate improved properties, e.g., improved single-stranded RNA interference activity, RNase H-mediated knockdown, improved delivery, etc.

[0284] In some embodiments, oligonucleotide properties can be adjusted by optimizing stereochemistry (pattern of backbone chiral centers) and chemical modifications (modifications of base, sugar, and/or internucleotidic linkage) or patterns thereof.

[0285] In some embodiments, a common pattern of backbone chiral centers (e.g., a pattern of backbone chiral centers in a single-stranded RNAi agent) comprises a pattern of OSOSO, OSSSO, OSSSOS, SOSO, SOSO, SOSOS, SOSOSO, SOSOSOSO, SOSSSO, SSOSSSOSS, SSSOSOSSS, SSSSOSOSSSS, SSSSS, SSSSSS, SSSSSSS, SSSSSSSS, SSSSSSSSS, or RRR, wherein S represents a phosphorothioate in the Sp configuration, and O represents a phosphodiester. wherein R represents a phosphorothioate in the Rp configuration.

[0286] In some embodiments, the non-chiral center is a phosphodiester linkage. In some embodiments, the chiral center in a Sp configuration is a phosphorothioate linkage. In some embodiments, the non-chiral center is a phosphodiester linkage. In some embodiments, the chiral center in a Sp configuration is a phosphorothioate linkage.

[0287] In some embodiments, a provided oligonucleotide comprises any pattern of stereochemistry described herein. In some embodiments, a provided oligonucleotide comprises any pattern of stereochemistry described herein and is capable of directing RNA interference. In some embodiments, a provided oligonucleotide comprises any pattern of stereochemistry described herein and is capable of directing RNase H-mediated knockdown. In some embodiments, a provided oligonucleotide comprises any pattern of stereochemistry described herein and is capable of directing RNA interference and RNase H-mediated knockdown. In some embodiments, a provided oligonucleotide comprises any pattern of stereochemistry described herein and is capable of directing RNA interference, wherein the pattern of stereochemistry is in the seed and/or post-seed region. In some embodiments, a provided oligonucleotide comprises any pattern of stereochemistry described herein and is capable of directing RNA interference and RNase H-mediated knockdown, wherein the pattern of stereochemistry is in the seed and/or post-seed region.

[0288] In some embodiments, a provided oligonucleotide comprises any modification or pattern of modification described herein. In some embodiments, a provided oligonucleotide comprises any modification or pattern of modification described herein and is capable of directing RNA interference. In some embodiments, a provided oligonucleotide comprises any pattern of modification described herein and is capable of directing RNase H-mediated knockdown. In some embodiments, a provided oligonucleotide comprises any pattern of modification described herein and is capable of directing RNA interference and RNase H-mediated knockdown. In some embodiments, a provided oligonucleotide comprises any pattern of modification described herein and is capable of directing RNA interference, wherein the pattern of modification is in the seed and/or post-seed region. In some embodiments, a provided oligonucleotide comprises any pattern of modification described herein and is capable of directing RNA interference and RNase H-mediated knockdown, wherein the pattern of modification is in the seed and/or post-seed region. In some embodiments, a modification or pattern of modification is a modification or pattern of modifications at the 2′ position of a sugar. In some embodiments, a modification or pattern of modification is a modification or pattern of modifications of sugars, e.g., at the 2′ position of a sugar, including but not limited to, 2′-deoxy, 2′-F, 2′-OMe, 2′-MOE, and 2′-OR1, wherein R1 is optionally substituted C1-6 alkyl.

[0289] In some embodiments, the present disclosure demonstrates that 2′-F modifications, among other things, can improve single-stranded RNA interference. In some embodiments, the present disclosure demonstrates that Sp internucleotidic linkages, among other things, at the 5′- and 3′-ends can improve oligonucleotide stability. In some embodiments, the present disclosure demonstrates that, among other things, natural phosphate linkages and/or Rp internucleotidic linkages can improve removal of oligonucleotides from a system. As appreciated by a person having ordinary skill in the art, various assays known in the art can be utilized to assess such properties in accordance with the present disclosure.

[0290] In some embodiments, provided oligonucleotides capable of directing single-stranded RNA interference comprise one or more modified sugar moieties. In some embodiments, 5% or more of the sugar moieties of provided oligonucleotides are modified.

[0291] In some embodiments, the present disclosure provides an APOC3 oligonucleotide composition comprising a first plurality of oligonucleotides, wherein:

[0292] oligonucleotides of the first plurality have the same base sequence; and

[0293] oligonucleotides of the first plurality comprise one or more modified sugar moieties, or comprise one or more natural phosphate linkages and one or more modified internucleotidic linkages.

[0294] In some embodiments, oligonucleotides of the first plurality comprise one or more modified sugar moieties. In some embodiments, provided oligonucleotides comprise one or more modified sugar moieties.

[0295] In some embodiments, provided compositions alter transcript single-stranded RNA interference so that an undesired target and/or biological function are suppressed. In some embodiments, in such cases provided composition can also induce cleavage of the transcript after hybridization.

[0296] In some embodiments, each oligonucleotide of the first plurality comprises one or more modified sugar moieties and/or one or more modified internucleotidic linkages. In some embodiments, each oligonucleotide of the first plurality comprises no more than about 95% unmodified sugar moieties. In some embodiments, each oligonucleotide of the first plurality comprises no more than about 50% unmodified sugar moieties. In some embodiments, each oligonucleotide of the first plurality comprises no more than about 5% unmodified sugar moieties. In some embodiments, each sugar moiety of the oligonucleotides of the first plurality is independently modified.

[0297] In some embodiments, each oligonucleotide of the first plurality comprises two or more modified internucleotidic linkages. In some embodiments, each oligonucleotide of the first plurality comprises three or more modified internucleotidic linkages. In some embodiments, each oligonucleotide of the first plurality comprises four or more modified internucleotidic linkages. In some embodiments, each oligonucleotide of the first plurality comprises five or more modified internucleotidic linkages. In some embodiments, each oligonucleotide of the first plurality comprises ten or more modified internucleotidic linkages.

[0298] In some embodiments, each oligonucleotide of the first plurality comprises no more than about 30% natural phosphate linkages. In some embodiments, each oligonucleotide of the first plurality comprises no more than about 20% natural phosphate linkages. In some embodiments, each oligonucleotide of the first plurality comprises no more than about 10% natural phosphate linkages. In some embodiments, each oligonucleotide of the first plurality comprises no more than about 5% natural phosphate linkages.

[0299] In some embodiments, provided oligonucleotides contain increased levels of one or more isotopes. In some embodiments, provided oligonucleotides are labeled, e.g., by one or more isotopes of one or more elements, e.g., hydrogen, carbon, nitrogen, etc. In some embodiments, provided oligonucleotides in provided compositions, e.g., oligonucleotides of a first plurality, comprise base modifications, sugar modifications, and/or internucleotidic linkage modifications, wherein the oligonucleotides contain an enriched level of deuterium. In some embodiments, provided oligonucleotides are labeled with deuterium (replacing —¹H with —²H) at one or more positions. In some embodiments, one or more ¹H of an APOC3 oligonucleotide or any moiety conjugated to the oligonucleotide (e.g., a targeting moiety, lipid moiety, etc.) is substituted with ²H. Such oligonucleotides can be used in any composition or method described herein.

[0300] The present invention includes all pharmaceutically acceptable isotopically-labelled compounds wherein one or more atoms are replaced by atoms having the same atomic number, but an atomic mass or mass number different from the atomic mass or mass number usually found in nature.

[0301] Examples of isotopes suitable for inclusion in the compounds of the invention include isotopes of hydrogen, such as ²H and ³H, carbon, such as ¹¹C, ¹³C and ¹⁴C, chlorine, such as ³⁶Cl, fluorine, such as ¹⁸F, iodine, such as ¹²³I, ¹²⁴I and ¹²⁵I, nitrogen, such as ¹³N and ¹⁵N, oxygen, such as ¹⁵O, ¹⁷O and ¹⁸O, phosphorus, such as ³²P, and sulphur, such as ³⁵S.

[0302] Certain isotopically-labelled compounds of Formula (I), for example, those incorporating a radioactive isotope, are useful in drug and/or substrate tissue distribution studies. The radioactive isotopes tritium, i.e. ³H, and carbon-14, i.e. ¹⁴C, are particularly useful for this purpose in view of their ease of incorporation and ready means of detection.

[0303] Substitution with heavier isotopes such as deuterium, i.e. ²H, may afford certain therapeutic advantages resulting from greater metabolic stability, for example, increased in vivo half-life or reduced dosage requirements, and hence may be preferred in some circumstances.

[0304] Substitution with positron emitting isotopes, such as ¹¹C, ¹⁸F, ¹⁵O and ¹³N, can be useful in Positron Emission Tomography (PET) studies for examining substrate receptor occupancy.

[0305] Isotopically-labelled compounds can generally be prepared by conventional techniques known to those skilled in the art or by processes analogous to those described in the accompanying Examples and Preparations using an appropriate isotopically-labelled reagents in place of the non-labelled reagent previously employed.

[0306] The compounds of the present invention may contain asymmetric or chiral centers, and, therefore, exist in different stereoisomeric forms. Unless specified otherwise, it is intended that all stereoisomeric forms of the compounds of the present invention as well as mixtures thereof, including racemic mixtures, form part of the present invention. In addition, the present invention embraces all geometric and positional isomers. For example, if a compound of the present invention incorporates a double bond or a fused ring, both the cis- and trans-forms, as well as mixtures, are embraced within the scope of the invention.

[0307] Chiral compounds of the invention (and chiral precursors thereof) may be obtained in enantiomerically-enriched form using chromatography, typically high pressure liquid chromatography (HPLC) or supercritical fluid chromatography (SFC), on a resin with an asymmetric stationary phase and with a mobile phase consisting of a hydrocarbon, typically heptane or hexane, containing from 0 to 50% isopropanol, typically from 2 to 20%, and from 0 to 5% of an alkylamine, typically 0.1% diethylamine (DEA) or isopropylamine. Concentration of the eluent affords the enriched mixture.

[0308] Diastereomeric mixtures can be separated into their individual diastereoisomers on the basis of their physical chemical differences by methods well known to those skilled in the art, such as by chromatography and/or fractional crystallization. Enantiomers can be separated by converting the enantiomeric mixture into a diastereomeric mixture by reaction with an appropriate optically active compound (e.g. chiral auxiliary such as a chiral alcohol or Mosher's acid chloride), separating the diastereoisomers and converting (e.g. hydrolyzing) the individual diastereoisomers to the corresponding pure enantiomers. Enantiomers can also be separated by use of a chiral HPLC column. Alternatively, the specific stereoisomers may be synthesized by using an optically active starting material, by asymmetric synthesis using optically active reagents, substrates, catalysts or solvents, or by converting one stereoisomer into the other by asymmetric transformation.

[0309] In some embodiments, controlling structural elements of oligonucleotides, such as chemical modifications (e.g., modifications of a sugar, base and/or internucleotidic linkage) or patterns thereof, alterations in stereochemistry (e.g., stereochemistry of a backbone chiral internucleotidic linkage) or patterns thereof, substitution of an atom with an isotope of the same element, and/or conjugation with an additional chemical moiety (e.g., a lipid moiety, targeting moiety, etc.) can have a significant impact on a desired biological effect. In some embodiments, a desired biological effect is enhanced by more than 2 fold.

[0310] In some embodiments, a desired biological effect is directing a decrease in the expression and/or level of a target gene or its gene product. In some embodiments, a desired biological effect is improved single-stranded RNA interference. In some embodiments, a desired biological effect is improved RNase H-mediated knockdown. In some embodiments, a desired biological effect is improved single-stranded RNA interference and/or RNase H-mediated knockdown.

[0311] In some embodiments, the present disclosure provides an APOC3 oligonucleotide composition comprising a first plurality of oligonucleotides which:

[0312] 1) have a common base sequence complementary to a target sequence in a transcript; and

[0313] 2) comprise one or more modified sugar moieties and modified internucleotidic linkages.

[0314] In some embodiments, a provided oligonucleotide composition is characterized in that, when it is contacted with the transcript in a single-stranded RNA interference system, RNAi-mediated knockdown of the transcript is improved relative to that observed under reference conditions selected from the group consisting of absence of the composition, presence of a reference composition, and combinations thereof.

[0315] In some embodiments, the present disclosure provides an APOC3 oligonucleotide composition comprising a first plurality of oligonucleotides capable of directing single-stranded RNA interference, wherein an APOC3 oligonucleotides type is defined by:

[0316] 1) base sequence;

[0317] 2) pattern of backbone linkages;

[0318] 3) pattern of backbone chiral centers; and

[0319] 4) pattern of backbone phosphorus modifications,

which composition is chirally controlled in that it is enriched, relative to a substantially racemic preparation of oligonucleotides having the same base sequence, for oligonucleotides of the particular oligonucleotide type,

[0320] the oligonucleotide composition being characterized in that, when it is contacted with the transcript in a single-stranded RNA interference system, RNAi-mediated knockdown of the transcript is improved relative to that observed under reference conditions selected from the group consisting of absence of the composition, presence of a reference composition, and combinations thereof.

[0321] In some embodiments, each of the consecutive nucleoside units is independently preceded and/or followed by a modified internucleotidic linkage. In some embodiments, each of the consecutive nucleoside units is independently preceded and/or followed by a phosphorothioate linkage. In some embodiments, each of the consecutive nucleoside units is independently preceded and/or followed by a chirally controlled modified internucleotidic linkage. In some embodiments, each of the consecutive nucleoside units is independently preceded and/or followed by a chirally controlled phosphorothioate linkage. In some embodiments, a modified internucleotidic linkage has a structure of Formula I. In some embodiments, a modified internucleotidic linkage has a structure of Formula I-a.

[0322] In some embodiments, the present disclosure provides a single-stranded RNAi agent comprising a predetermined level of a first plurality of oligonucleotides, wherein:

[0323] oligonucleotides of the first plurality have the same base sequence;

[0324] oligonucleotides of the first plurality comprise a seed region comprising 2, 3, 4, 5, 6, 7 or more consecutive Sp modified internucleotidic linkages, a post-seed region comprising 2, 3, 4, 5, 6, 7, 8, 9, 10 or more consecutive Sp modified internucleotidic linkages.

[0325] In some embodiments, a seed region comprises 2 or more consecutive Sp modified internucleotidic linkages.

[0326] In some embodiments, a modified internucleotidic linkage has a structure of Formula I. In some embodiments, a modified internucleotidic linkage has a structure of Formula I-a.

[0327] As demonstrated in the present disclosure, in some embodiments, a provided oligonucleotide composition is characterized in that, when it is contacted with the transcript in a single-stranded RNA interference system, RNAi-mediated knockdown of the transcript is improved relative to that observed under reference conditions selected from the group consisting of absence of the composition, presence of a reference composition, and combinations thereof.

[0328] In some embodiments, the present disclosure provides an APOC3 oligonucleotide composition comprising a first plurality of oligonucleotides defined by having:

[0329] 1) a common base sequence and length;

[0330] 2) a common pattern of backbone linkages; and

[0331] 3) a common pattern of backbone chiral centers, which composition is a substantially pure preparation of a single oligonucleotide in that a predetermined level of the oligonucleotides in the composition have the common base sequence and length, the common pattern of backbone linkages, and the common pattern of backbone chiral centers.

[0332] In some embodiments, a common base sequence and length may be referred to as a common base sequence. In some embodiments, oligonucleotides having a common base sequence may have the same pattern of nucleoside modifications, e.g. sugar modifications, base modifications, etc. In some embodiments, a pattern of nucleoside modifications may be represented by a combination of locations and modifications. In some embodiments, a pattern of backbone linkages comprises locations and types (e.g., phosphate, phosphorothioate, substituted phosphorothioate, etc.) of each internucleotidic linkages. A pattern of backbone chiral centers of an APOC3 oligonucleotide can be designated by a combination of linkage phosphorus stereochemistry (Rp/Sp) from 5′ to 3′. As exemplified above, locations of non-chiral linkages may be obtained, for example, from pattern of backbone linkages.

[0333] As understood by a person having ordinary skill in the art, a stereorandom or racemic preparation of oligonucleotides is prepared by non-stereoselective and/or low-stereoselective coupling of nucleotide monomers, typically without using any chiral auxiliaries, chiral modification reagents, and/or chiral catalysts. In some embodiments, in a substantially racemic (or chirally uncontrolled) preparation of oligonucleotides, all or most coupling steps are not chirally controlled in that the coupling steps are not specifically conducted to provide enhanced stereoselectivity. An example substantially racemic preparation of oligonucleotides is the preparation of phosphorothioate oligonucleotides through sulfurizing phosphite triesters from commonly used phosphoramidite oligonucleotide synthesis with either tetraethylthiuram disulfide or (TETD) or 3H-1, 2-bensodithiol-3-one 1, 1-dioxide (BDTD), a well-known process in the art. In some embodiments, substantially racemic preparation of oligonucleotides provides substantially racemic oligonucleotide compositions (or chirally uncontrolled oligonucleotide compositions).

[0334] As understood by a person having ordinary skill in the art, in some embodiments, diastereoselectivity of a coupling or a linkage can be assessed through the diastereoselectivity of a dimer formation under the same or comparable conditions, wherein the dimer has the same 5′- and 3′-nucleosides and internucleotidic linkage.

[0335] In some embodiments, the present disclosure provides chirally controlled oligonucleotide composition of a first plurality of oligonucleotides in that the composition is enriched, relative to a substantially racemic preparation of the same oligonucleotides, for oligonucleotides of a single oligonucleotide type. In some embodiments, the present disclosure provides chirally controlled oligonucleotide composition of a first plurality of oligonucleotides in that the composition is enriched, relative to a substantially racemic preparation of the same oligonucleotides, for oligonucleotides of a single oligonucleotide type that share:

[0336] 1) a common base sequence and length;

[0337] 2) a common pattern of backbone linkages; and

[0338] 3) a common pattern of backbone chiral centers.

[0339] In some embodiments, the present disclosure provides an APOC3 oligonucleotide composition comprising a first plurality of oligonucleotides capable of directing single-stranded RNA interference, wherein oligonucleotides are of a particular oligonucleotide type characterized by:

[0340] 1) a common base sequence and length;

[0341] 2) a common pattern of backbone linkages; and

[0342] 3) a common pattern of backbone chiral centers;

which composition is chirally controlled in that it is enriched, relative to a substantially racemic preparation of oligonucleotides having the same base sequence and length, for oligonucleotides of the particular oligonucleotide type.

[0343] In some embodiments, oligonucleotides having a common base sequence and length, a common pattern of backbone linkages, and a common pattern of backbone chiral centers have a common pattern of backbone phosphorus modifications and a common pattern of base modifications. In some embodiments, oligonucleotides having a common base sequence and length, a common pattern of backbone linkages, and a common pattern of backbone chiral centers have a common pattern of backbone phosphorus modifications and a common pattern of nucleoside modifications. In some embodiments, oligonucleotides having a common base sequence and length, a common pattern of backbone linkages, and a common pattern of backbone chiral centers have identical structures.

[0344] In some embodiments, oligonucleotides of an APOC3 oligonucleotide type have a common pattern of backbone phosphorus modifications and a common pattern of sugar modifications. In some embodiments, oligonucleotides of an APOC3 oligonucleotide type have a common pattern of backbone phosphorus modifications and a common pattern of base modifications. In some embodiments, oligonucleotides of an APOC3 oligonucleotide type have a common pattern of backbone phosphorus modifications and a common pattern of nucleoside modifications. In some embodiments, oligonucleotides of an APOC3 oligonucleotide type are identical.

[0345] In some embodiments, oligonucleotides having a common base sequence and length, a common pattern of backbone linkages, and a common pattern of backbone chiral centers have a common pattern of backbone phosphorus modifications. In some embodiments, oligonucleotides having a common base sequence and length, a common pattern of backbone linkages, and a common pattern of backbone chiral centers have a common pattern of backbone phosphorus modifications and a common pattern of nucleoside modifications. In some embodiments, oligonucleotides having a common base sequence and length, a common pattern of backbone linkages, and a common pattern of backbone chiral centers have a common pattern of backbone phosphorus modifications and a common pattern of sugar modifications. In some embodiments, oligonucleotides having a common base sequence and length, a common pattern of backbone linkages, and a common pattern of backbone chiral centers have a common pattern of backbone phosphorus modifications and a common pattern of base modifications. In some embodiments, oligonucleotides having a common base sequence and length, a common pattern of backbone linkages, and a common pattern of backbone chiral centers have a common pattern of backbone phosphorus modifications and a common pattern of nucleoside modifications. In some embodiments, oligonucleotides having a common base sequence and length, a common pattern of backbone linkages, and a common pattern of backbone chiral centers are identical.

[0346] In some embodiments, oligonucleotides in provided compositions have a common pattern of backbone phosphorus modifications. In some embodiments, a common base sequence is a base sequence of an APOC3 oligonucleotide type. In some embodiments, a provided composition is an APOC3 oligonucleotide composition that is chirally controlled in that the composition contains a predetermined level of a first plurality of oligonucleotides of an individual oligonucleotide type, wherein an APOC3 oligonucleotide type is defined by:

[0347] 1) base sequence;

[0348] 2) pattern of backbone linkages;

[0349] 3) pattern of backbone chiral centers; and

[0350] 4) pattern of backbone phosphorus modifications.

[0351] As noted above and understood in the art, in some embodiments, the base sequence of an APOC3 oligonucleotide may refer to the identity and/or modification status of nucleoside residues (e.g., of sugar and/or base components, relative to standard naturally occurring nucleotides such as adenine, cytosine, guanosine, thymine, and uracil) in the oligonucleotide and/or to the hybridization character (i.e., the ability to hybridize with particular complementary residues) of such residues.

[0352] In some embodiments, oligonucleotides of a particular type are identical in that they have the same base sequence (including length), the same pattern of chemical modifications to sugar and base moieties, the same pattern of backbone linkages (e.g., pattern of natural phosphate linkages, phosphorothioate linkages, phosphorothioate triester linkages, and combinations thereof), the same pattern of backbone chiral centers (e.g., pattern of stereochemistry (Rp/Sp) of chiral internucleotidic linkages), and the same pattern of backbone phosphorus modifications (e.g., pattern of modifications on the internucleotidic phosphorus atom, such as —S⁻, and -L-R¹ of Formula I).

[0353] Among other things, the present disclosure recognizes that combinations of oligonucleotide structural elements (e.g., patterns of chemical modifications, backbone linkages, backbone chiral centers, and/or backbone phosphorus modifications) can provide surprisingly improved properties such as bioactivities.

[0354] In some embodiments, provided chirally controlled (and/or stereochemically pure) preparations are RNAi agent oligonucleotides.

[0355] In some embodiments, provided chirally controlled (and/or stereochemically pure) preparations are of oligonucleotides that include one or more modified backbone linkages, bases, and/or sugars.

[0356] In some embodiments, provided compositions comprise oligonucleotides containing one or more residues which are modified at the sugar moiety. In some embodiments, provided compositions comprise oligonucleotides containing one or more residues which are modified at the 2′ position of the sugar moiety (referred to herein as a “2′-modification”). Examples of such modifications are described above and herein and include, but are not limited to, 2′-OMe, 2′-MOE, 2′-LNA, 2′-F, FRNA, FANA, S-cEt, etc. In some embodiments, provided compositions comprise oligonucleotides containing one or more residues which are 2′-modified. For example, in some embodiments, provided oligonucleotides contain one or more residues which are 2′-O-methoxyethyl (2′-MOE)-modified residues. In some embodiments, provided compositions comprise oligonucleotides which do not contain any 2′-modifications. In some embodiments, provided compositions are oligonucleotides which do not contain any 2′-MOE residues. That is, in some embodiments, provided oligonucleotides are not MOE-modified. Additional example sugar modifications are described in the present disclosure.

[0357] In some embodiments, one or more is one. In some embodiments, one or more is two. In some embodiments, one or more is three. In some embodiments, one or more is four. In some embodiments, one or more is five. In some embodiments, one or more is six. In some embodiments, one or more is seven. In some embodiments, one or more is eight. In some embodiments, one or more is nine. In some embodiments, one or more is ten. In some embodiments, one or more is at least one. In some embodiments, one or more is at least two. In some embodiments, one or more is at least three. In some embodiments, one or more is at least four. In some embodiments, one or more is at least five. In some embodiments, one or more is at least six. In some embodiments, one or more is at least seven. In some embodiments, one or more is at least eight. In some embodiments, one or more is at least nine. In some embodiments, one or more is at least ten.

[0358] In some embodiments, a sugar moiety without a 2′-modification is a sugar moiety found in a natural DNA nucleoside.

[0359] A person of ordinary skill in the art understands that various regions of a target transcript can be targeted by provided compositions and methods. In some embodiments, a base sequence of provided oligonucleotides comprises an intron sequence. In some embodiments, a base sequence of provided oligonucleotides comprises an exon sequence. In some embodiments, a base sequence of provided oligonucleotides comprises an intron and an exon sequence.

[0360] As understood by a person having ordinary skill in the art, provided oligonucleotides and compositions, among other things, can target a great number of nucleic acid polymers. For instance, in some embodiments, provided oligonucleotides and compositions may target a transcript of a nucleic acid sequence, wherein a common base sequence of oligonucleotides (e.g., a base sequence of an APOC3 oligonucleotide type) comprises or is a sequence complementary to a sequence of the transcript. In some embodiments, a common base sequence comprises a sequence complimentary to a sequence of a target. In some embodiments, a common base sequence is a sequence complimentary to a sequence of a target. In some embodiments, a common base sequence comprises or is a sequence 100% complimentary to a sequence of a target. In some embodiments, a common base sequence comprises a sequence 100% complimentary to a sequence of a target. In some embodiments, a common base sequence is a sequence 100% complimentary to a sequence of a target.

[0361] In some embodiments, a common base sequence comprises or is a sequence complementary to a characteristic sequence element. In some embodiments, a common base sequence comprises a sequence complementary to a characteristic sequence element. In some embodiments, a common base sequence is a sequence complementary to a characteristic sequence element. In some embodiments, a common base sequence comprises or is a sequence 100% complementary to a characteristic sequence element. In some embodiments, a common base sequence comprises a sequence 100% complementary to a characteristic sequence element. In some embodiments, a common base sequence is a sequence 100% complementary to a characteristic sequence element. In some embodiments herein, a characteristic sequence element is, as non-limiting examples, a seed region, a post-seed region or a portion of a seed region, or a portion of a post-seed region or a 3′-terminal dinucleotide.

[0362] In some embodiments, a characteristic sequence element comprises or is a mutation. In some embodiments, a characteristic sequence element comprises a mutation. In some embodiments, a characteristic sequence element is a mutation. In some embodiments, a characteristic sequence element comprises or is a point mutation. In some embodiments, a characteristic sequence element comprises a point mutation. In some embodiments, a characteristic sequence element is a point mutation. In some embodiments, a characteristic sequence element comprises or is an SNP. In some embodiments, a characteristic sequence element comprises an SNP. In some embodiments, a characteristic sequence element is an SNP.

[0363] In some embodiments, a common base sequence 100% matches a target sequence, which it does not 100% match a similar sequence of the target sequence.

[0364] Among other things, the present disclosure recognizes that a base sequence may have impact on oligonucleotide properties. In some embodiments, a base sequence may have impact on cleavage pattern of a target when oligonucleotides having the base sequence are utilized for suppressing a target, e.g., through a pathway involving RNase H: for example, structurally similar (all phosphorothioate linkages, all stereorandom) oligonucleotides have different sequences may have different cleavage patterns.

[0365] In some embodiments, a common base sequence is a base sequence that comprises a SNP.

[0366] As a person having ordinary skill in the art understands, provided oligonucleotide compositions and methods have various uses as known by a person having ordinary skill in the art. Methods for assessing provided compositions, and properties and uses thereof, are also widely known and practiced by a person having ordinary skill in the art. Example properties, uses, and/or methods include but are not limited to those described in WO/2014/012081 and WO/2015/107425.

[0367] In some embodiments, a chiral internucleotidic linkage has the structure of Formula I. In some embodiments, a chiral internucleotidic linkage is phosphorothioate. In some embodiments, each chiral internucleotidic linkage in a single oligonucleotide of a provided composition independently has the structure of Formula I. In some embodiments, each chiral internucleotidic linkage in a single oligonucleotide of a provided composition is a phosphorothioate.

[0368] In some embodiments, oligonucleotides of the present disclosure comprise one or more modified sugar moieties. In some embodiments, oligonucleotides of the present disclosure comprise one or more modified base moieties. As known by a person of ordinary skill in the art and described in the disclosure, various modifications can be introduced to a sugar and/or moiety. For example, in some embodiments, a modification is a modification described in U.S. Pat. No. 9,006,198, WO2014/012081 and WO/2015/107425, the sugar and base modifications of each of which are incorporated herein by reference.

[0369] In some embodiments, a sugar modification is a 2′-modification. Commonly used 2′-modifications include but are not limited to 2′-OR¹, wherein R′ is not hydrogen. In some embodiments, a modification is 2′-OR, wherein R is optionally substituted aliphatic. In some embodiments, a modification is 2′-OMe. In some embodiments, a modification is 2′-O-MOE. In some embodiments, the present disclosure demonstrates that inclusion and/or location of particular chirally pure internucleotidic linkages can provide stability improvements comparable to or better than those achieved through use of modified backbone linkages, bases, and/or sugars. In some embodiments, a provided single oligonucleotide of a provided composition has no modifications on the sugars. In some embodiments, a provided single oligonucleotide of a provided composition has no modifications on 2′-positions of the sugars (i.e., the two groups at the 2′-position are either —H/—H or —H/—OH). In some embodiments, a provided single oligonucleotide of a provided composition does not have any 2′-MOE modifications.

[0370] In some embodiments, a 2′-modification is —O-L- or -L- which connects the 2′-carbon of a sugar moiety to another carbon of a sugar moiety. In some embodiments, a 2′-modification is —O-L- or -L- which connects the 2′-carbon of a sugar moiety to the 4′-carbon of a sugar moiety. In some embodiments, a 2′-modification is S-cEt. In some embodiments, a modified sugar moiety is an LNA moiety.

[0371] In some embodiments, a 2′-modification is —F. In some embodiments, a 2′-modification is FANA. In some embodiments, a 2′-modification is FRNA.

[0372] In some embodiments, a sugar modification is a 5′-modification, e.g., R-5′-Me, S-5′-Me, etc.

[0373] In some embodiments, a sugar modification changes the size of the sugar ring. In some embodiments, a sugar modification is the sugar moiety in FHNA.

[0374] In some embodiments, a sugar modification replaces a sugar moiety with another cyclic or acyclic moiety. Examples of such moieties are widely known in the art, including but not limited to those used in morpholino (optionally with its phosphorodiamidate linkage), glycol nucleic acids, etc.

[0375] In some embodiments, an ssRNAi agent is or comprises an APOC3 oligonucleotide selected from the group consisting of any ssRNAi of any format described in FIG. 1 or otherwise herein. Those skilled in the art, reading the present specification, will appreciate that the present disclosure specifically does not exclude the possibility that any oligonucleotide described herein which is labeled as a ssRNAi agent may also or alternatively operate through another mechanism (e.g., as an antisense oligonucleotide; mediating knock-down via a RNaseH mechanism; sterically hindering translation; or any other biochemical mechanism).

[0376] In some embodiments, an antisense oligonucleotide (ASO) is or comprises an APOC3 oligonucleotide selected from the group consisting of any oligonucleotide of any format described in FIG. 2. Those skilled in the art, reading the present specification, will appreciate that the present disclosure specifically does not exclude the possibility that any oligonucleotide described herein which is labeled as an antisense oligonucleotide (ASO) may also or alternatively operate through another mechanism (e.g., as a ssRNAi utilizing RISC); the disclosure also notes that various ASOs may operate via different mechanisms (utilizing RNaseH, sterically blocking translation or other post-transcriptional processes, changing the conformation of a target nucleic acid, etc.).

[0377] In some embodiments, a hybrid oligonucleotide is or comprises an APOC3 oligonucleotide selected from the group consisting of: WV-2111, WV-2113, WV-2114, WV-2148, WV-2149, WV-2152, WV-2153, WV-2156, WV-2157, WV-2387, WV-3069, WV-7523, WV-7524, WV-7525, WV-7526, WV-7527, WV-7528, and any oligonucleotide of any of Formats S40 to S42 of FIG. 1L; or Formats 30-32, 66-69 or 101-103 of FIG. 1. Those skilled in the art, reading the present specification, will appreciate that the present disclosure specifically does not exclude the possibility that any oligonucleotide described herein which is labeled as a hybrid oligonucleotide may also or alternatively operate through another mechanism (e.g., as an antisense oligonucleotide; mediating knock-down via a RNaseH mechanism; sterically hindering translation; or any other biochemical mechanism).

### Chirally Controlled Oligonucleotides and Chirally Controlled Oligonucleotide Compositions

[0378] In some embodiments, provided oligonucleotides are capable of directing a decrease in the expression and/or level of a target gene or its gene product. In some embodiments, provided oligonucleotides are capable of directing a decrease in the expression and/or level of a target gene or its gene product via RNA interference. In some embodiments, provided oligonucleotides are capable of directing a decrease in the expression and/or level of a target gene or its gene product via a biochemical mechanism which does not involve RNA interference or RISC (including, but not limited to, RNaseH-mediated knockdown or steric hindrance of gene expression). In some embodiments, provided oligonucleotides are capable of directing a decrease in the expression and/or level of a target gene or its gene product via RNA interference and/or RNase H-mediated knockdown. In some embodiments, provided oligonucleotides are capable of directing a decrease in the expression and/or level of a target gene or its gene product by sterically blocking translation after annealing to a target gene mRNA, and/or by altering or interfering with mRNA splicing and/or exon inclusion or exclusion. In some embodiments, provided oligonucleotides are chirally controlled.

[0379] The present disclosure provides chirally controlled oligonucleotides, and chirally controlled oligonucleotide compositions which are of high crude purity and of high diastereomeric purity. In some embodiments, the present disclosure provides chirally controlled oligonucleotides, and chirally controlled oligonucleotide compositions which are of high crude purity. In some embodiments, the present disclosure provides chirally controlled oligonucleotides, and chirally controlled oligonucleotide compositions which are of high diastereomeric purity.

[0380] In some embodiments, a single-stranded RNAi agent is a substantially pure preparation of an APOC3 oligonucleotide type in that oligonucleotides in the composition that are not of the oligonucleotide type are impurities form the preparation process of said oligonucleotide type, in some case, after certain purification procedures.

[0381] In some embodiments, the present disclosure provides oligonucleotides comprising one or more diastereomerically pure internucleotidic linkages with respect to the chiral linkage phosphorus. In some embodiments, the present disclosure provides oligonucleotides comprising one or more diastereomerically pure internucleotidic linkages having the structure of Formula I. In some embodiments, the present disclosure provides oligonucleotides comprising one or more diastereomerically pure internucleotidic linkages with respect to the chiral linkage phosphorus, and one or more phosphate diester linkages. In some embodiments, the present disclosure provides oligonucleotides comprising one or more diastereomerically pure internucleotidic linkages having the structure of Formula I, and one or more phosphate diester linkages. In some embodiments, the present disclosure provides oligonucleotides comprising one or more diastereomerically pure internucleotidic linkages having the structure of Formula I-c, and one or more phosphate diester linkages. In some embodiments, such oligonucleotides are prepared by using stereoselective oligonucleotide synthesis, as described in this application, to form pre-designed diastereomerically pure internucleotidic linkages with respect to the chiral linkage phosphorus. Example internucleotidic linkages, including those having structures of Formula I, are further described below.

[0382] In some embodiments, the present disclosure provides a chirally controlled oligonucleotide, wherein at least two of the individual internucleotidic linkages within the oligonucleotide have different stereochemistry and/or different P-modifications relative to one another.

[0383] Internucleotidic Linkages

[0384] In some embodiments, provided oligonucleotides are capable of directing a decrease in the expression and/or level of a target gene or its gene product. In some embodiments, provided oligonucleotides are capable of directing a decrease in the expression and/or level of a target gene or its gene product via RNA interference. In some embodiments, provided oligonucleotides are capable of directing a decrease in the expression and/or level of a target gene or its gene product via a biochemical mechanism which does not involve RNA interference or RISC (including, but not limited to, RNaseH-mediated knockdown or steric hindrance of gene expression). In some embodiments, provided oligonucleotides are capable of directing a decrease in the expression and/or level of a target gene or its gene product via RNA interference and/or RNase H-mediated knockdown. In some embodiments, provided oligonucleotides are capable of directing a decrease in the expression and/or level of a target gene or its gene product by sterically blocking translation after annealing to a target gene mRNA, and/or by altering or interfering with mRNA splicing and/or exon inclusion or exclusion. In some embodiments, provided oligonucleotides comprise any internucleotidic linkage described herein or known in the art.

[0385] In some embodiments, an APOC3 oligonucleotide, an APOC3 oligonucleotide that directs RNA interference, an APOC3 oligonucleotide that directs RNase H-mediated knockdown, or an APOC3 oligonucleotide that directs both RNA interference and RNase H-mediated knockdown can comprise any internucleotidic linkage described herein or known in the art.

[0386] A non-limiting example of an internucleotidic linkage or unmodified internucleotidic linkage is a phosphodiester; non-limiting examples of modified internucleotidic linkages include those in which one or more oxygen of a phosphodiester has been replaced by, as non-limiting examples, sulfur (as in a phosphorothioate), H, alkyl, or another moiety or element which is not oxygen. A non-limiting example of an internucleotidic linkage is a moiety which does not a comprise a phosphorus but serves to link two sugars. A non-limiting example of an internucleotidic linkage is a moiety which does not a comprise a phosphorus but serves to link two sugars in the backbone of an APOC3 oligonucleotide. Disclosed herein are additional non-limiting examples of nucleotides, modified nucleotides, nucleotide analogs, internucleotidic linkages, modified internucleotidic linkages, bases, modified bases, and base analogs, sugars, modified sugars, and sugar analogs, and nucleosides, modified nucleosides, and nucleoside analogs.

[0387] In certain embodiments, a internucleotidic linkage has the structure of Formula I:

[chemical structure]

wherein each variable is as defined and described below. In some embodiments, a linkage of Formula I is chiral. In some embodiments, the present disclosure provides a chirally controlled oligonucleotide comprising one or more modified internucleotidic linkages of Formula I. In some embodiments, the present disclosure provides a chirally controlled oligonucleotide comprising one or more modified internucleotidic linkages of Formula I, and wherein individual internucleotidic linkages of Formula I within the oligonucleotide have different P-modifications relative to one another. In some embodiments, the present disclosure provides a chirally controlled oligonucleotide comprising one or more modified internucleotidic linkages of Formula I, and wherein individual internucleotidic linkages of Formula I within the oligonucleotide have different —X-L-R¹ relative to one another. In some embodiments, the present disclosure provides a chirally controlled oligonucleotide comprising one or more modified internucleotidic linkages of Formula I, and wherein individual internucleotidic linkages of Formula I within the oligonucleotide have different X relative to one another. In some embodiments, the present disclosure provides a chirally controlled oligonucleotide comprising one or more modified internucleotidic linkages of Formula I, and wherein individual internucleotidic linkages of Formula I within the oligonucleotide have different -L-R¹ relative to one another. In some embodiments, a chirally controlled oligonucleotide is an APOC3 oligonucleotide in a provided composition that is of the particular oligonucleotide type. In some embodiments, a chirally controlled oligonucleotide is an APOC3 oligonucleotide in a provided composition that has the common base sequence and length, the common pattern of backbone linkages, and the common pattern of backbone chiral centers. In some embodiments, a chirally controlled oligonucleotide is an APOC3 oligonucleotide in a chirally controlled composition that is of the particular oligonucleotide type, and the chirally controlled oligonucleotide is of the type. In some embodiments, a chirally controlled oligonucleotide is an APOC3 oligonucleotide in a provided composition that comprises a predetermined level of a plurality of oligonucleotides that share a common base sequence, a common pattern of backbone linkages, and a common pattern of backbone chiral centers, and the chirally controlled oligonucleotide shares the common base sequence, the common pattern of backbone linkages, and the common pattern of backbone chiral centers.

[0388] In some embodiments, a chirally controlled oligonucleotide comprises different internucleotidic phosphorus linkages.

[0389] In some embodiments, a phosphorothioate triester linkage comprises a chiral auxiliary, which, for example, is used to control the stereoselectivity of a reaction. In some embodiments, a phosphorothioate triester linkage does not comprise a chiral auxiliary. In some embodiments, a phosphorothioate triester linkage is intentionally maintained until and/or during the administration to a subject.

[0390] In some embodiments, a chirally controlled oligonucleotide is linked to a solid support. In some embodiments, a chirally controlled oligonucleotide is cleaved from a solid support.

[0391] In some embodiments, a chirally controlled oligonucleotide comprises at least one phosphate diester internucleotidic linkage and at least two consecutive modified internucleotidic linkages. In some embodiments, a chirally controlled oligonucleotide comprises at least one phosphate diester internucleotidic linkage and at least two consecutive phosphorothioate triester internucleotidic linkages.

[0392] In some embodiments, the present disclosure provides compositions comprising or consisting of a plurality of provided oligonucleotides (e.g., chirally controlled oligonucleotide compositions). In some embodiments, all such provided oligonucleotides are of the same type, i.e., all have the same base sequence, pattern of backbone linkages (i.e., pattern of internucleotidic linkage types, for example, phosphate, phosphorothioate, etc), pattern of backbone chiral centers (i.e. pattern of linkage phosphorus stereochemistry (Rp/Sp)), and pattern of backbone phosphorus modifications (e.g., pattern of “-XLR¹” groups in Formula I, disclosed herein). In some embodiments, all oligonucleotides of the same type are identical. In many embodiments, however, provided compositions comprise a plurality of oligonucleotides types, typically in pre-determined relative amounts.

[0393] In some embodiments, an APOC3 oligonucleotide, an APOC3 oligonucleotide that directs RNA interference, an APOC3 oligonucleotide that directs RNase H-mediated knockdown, or an APOC3 oligonucleotide that directs both RNA interference and RNase H-mediated knockdown can comprise any internucleotidic linkage described herein or known in the art. In some embodiments, a moiety that binds ASPGR is, for example, a GalNAc moiety is any GalNAc, or variant or modification thereof, as described herein or known in the art. In some embodiments, an APOC3 oligonucleotide, an APOC3 oligonucleotide that directs RNA interference, an APOC3 oligonucleotide that directs RNase H-mediated knockdown, or an APOC3 oligonucleotide that directs both RNA interference and RNase H-mediated knockdown can comprise any internucleotidic linkage described herein or known in the art in combination with any other structural element or modification described herein, including but not limited to, base sequence or portion thereof, sugar, base (nucleobase); stereochemistry or pattern thereof; additional chemical moiety, including but not limited to, a targeting moiety, a lipid moiety, a carbohydrate moiety, etc.; seed region; post-seed region; 5′-end structure; 5′-end region; 5′ nucleotide moiety; 3′-end region; 3′-terminal dinucleotide; 3′-end cap; length; additional chemical moiety, including but not limited to, a targeting moiety, lipid moiety, a GalNAc, etc.; format or any structural element thereof, and/or any other structural element or modification described herein; and in some embodiments, the present disclosure pertains to multimers of any such oligonucleotides.

[0394] In some embodiments, a chirally controlled oligonucleotide comprises one or more modified internucleotidic phosphorus linkages. In some embodiments, a chirally controlled oligonucleotide comprises, e.g., a phosphorothioate or a phosphorothioate triester linkage.

[0395] In some embodiments, a modified internucleotidic linkage is phosphorothioate. In some embodiments, a modified internucleotidic linkage is selected from those described in, for example: US 20110294124, US 20120316224, US 20140194610, US 20150211006, US 20150197540, WO 2015107425, PCT/US2016/043542, and PCT/US2016/043598, Whittaker et al. 2008 Tetrahedron Letters 49: 6984-6987.

[0396] Non-limiting examples of internucleotidic linkages also include those described in the art, including, but not limited to, those described in any of: Gryaznov, S.; Chen, J.-K. J. Am. Chem. Soc. 1994, 116, 3143, Jones et al. J. Org. Chem. 1993, 58, 2983, Koshkin et al. 1998 Tetrahedron 54: 3607-3630, Lauritsen et al. 2002 Chem. Comm. 5: 530-531, Lauritsen et al. 2003 Bioo. Med. Chem. Lett. 13: 253-256, Mesmaeker et al. Angew. Chem., Int. Ed. Engl. 1994, 33, 226, Petersen et al. 2003 TRENDS Biotech. 21: 74-81, Schultz et al. 1996 Nucleic Acids Res. 24: 2966, Ts'o et al. Ann. N. Y. Acad. Sci. 1988, 507, 220, and Vasseur et al. J. Am. Chem. Soc. 1992, 114, 4006.

[0397] In some embodiments, the present disclosure provides a chirally controlled oligonucleotide comprising a sequence found in any oligonucleotide disclosed herein. In some embodiments, the present disclosure provides a chirally controlled oligonucleotide comprising a sequence found in any oligonucleotide disclosed herein, wherein one or more U is replaced with T. In some embodiments, the present disclosure provides a chirally controlled oligonucleotide comprising a sequence found in any oligonucleotide disclosed herein, wherein the said sequence has over 50% identity with the sequence of any oligonucleotide disclosed herein.

[0398] In some embodiments, the present disclosure provides a chirally controlled oligonucleotide comprising the sequence of any oligonucleotide disclosed herein. In some embodiments, the present disclosure provides a chirally controlled oligonucleotide having the sequence of any oligonucleotide disclosed herein. In some embodiments, the present disclosure provides a chirally controlled oligonucleotide comprising a sequence found in any oligonucleotide disclosed herein, wherein the oligonucleotides have a pattern of backbone linkages, pattern of backbone chiral centers, and/or pattern of backbone phosphorus modifications described herein.

[0399] In some embodiments, the present disclosure provides a chirally controlled oligonucleotide comprising a sequence found in any oligonucleotide disclosed herein. In some embodiments, the present disclosure provides a chirally controlled oligonucleotide comprising a sequence found in any oligonucleotide disclosed herein, wherein one or more T is substituted with U. In some embodiments, the present disclosure provides a chirally controlled oligonucleotide comprising a sequence found in any oligonucleotide disclosed herein, wherein the said sequence has over 50% identity with the sequence of any oligonucleotide disclosed herein. In some embodiments, the present disclosure provides a chirally controlled oligonucleotide comprising a sequence found in any oligonucleotide disclosed herein, wherein the said sequence has over 60% identity with the sequence of any oligonucleotide disclosed herein. In some embodiments, the present disclosure provides a chirally controlled oligonucleotide comprising a sequence found in any oligonucleotide disclosed herein, wherein the said sequence has over 70% identity with the sequence of any oligonucleotide disclosed herein. In some embodiments, the present disclosure provides a chirally controlled oligonucleotide comprising a sequence found in any oligonucleotide disclosed herein, wherein the said sequence has over 80% identity with the sequence of any oligonucleotide disclosed herein. In some embodiments, the present disclosure provides a chirally controlled oligonucleotide comprising a sequence found in any oligonucleotide disclosed herein, wherein the said sequence has over 90% identity with the sequence of any oligonucleotide disclosed herein. In some embodiments, the present disclosure provides a chirally controlled oligonucleotide comprising a sequence found in any oligonucleotide disclosed herein, wherein the said sequence has over 95% identity with the sequence of any oligonucleotide disclosed herein. In some embodiments, the present disclosure provides a chirally controlled oligonucleotide comprising the sequence of any oligonucleotide disclosed herein. In some embodiments, the present disclosure provides a chirally controlled oligonucleotide having the sequence of any oligonucleotide disclosed herein.

[0400] In some embodiments, the present disclosure provides a chirally controlled oligonucleotide comprising the sequence of any oligonucleotide disclosed herein, wherein at least one internucleotidic linkage is

[chemical structure]

In some embodiments, the present disclosure provides a chirally controlled oligonucleotide comprising the sequence of any oligonucleotide disclosed herein, wherein each internucleotidic linkage is

[chemical structure]

In some embodiments, the present disclosure provides a chirally controlled oligonucleotide having the sequence of any oligonucleotide disclosed herein, wherein at least one internucleotidic linkage is

[chemical structure]

In some embodiments, the present disclosure provides a chirally controlled oligonucleotide having the sequence of any oligonucleotide disclosed herein, wherein each internucleotidic linkage is

[chemical structure]

In some embodiments, the present disclosure provides a chirally controlled oligonucleotide having the sequence of any oligonucleotide disclosed herein, wherein each cytosine is optionally and independently replaced by 5-methylcytosine. In some embodiments, the present disclosure provides a chirally controlled oligonucleotide having the sequence of any oligonucleotide disclosed herein, wherein at least one cytosine is optionally and independently replaced by 5-methylcytosine. In some embodiments, the present disclosure provides a chirally controlled oligonucleotide having the sequence of any oligonucleotide disclosed herein, wherein each cytosine is optionally and independently replaced by 5-methylcytosine.

### Bases (Nucleobases)

[0401] In some embodiments, provided oligonucleotides are capable of directing a decrease in the expression and/or level of a target gene or its gene product. In some embodiments, provided oligonucleotides are capable of directing a decrease in the expression and/or level of a target gene or its gene product via RNA interference. In some embodiments, provided oligonucleotides are capable of directing a decrease in the expression and/or level of a target gene or its gene product via a biochemical mechanism which does not involve RNA interference or RISC (including, but not limited to, RNaseH-mediated knockdown or steric hindrance of gene expression). In some embodiments, provided oligonucleotides are capable of directing a decrease in the expression and/or level of a target gene or its gene product via RNA interference and/or RNase H-mediated knockdown. In some embodiments, provided oligonucleotides are capable of directing a decrease in the expression and/or level of a target gene or its gene product by sterically blocking translation after annealing to a target gene mRNA, and/or by altering or interfering with mRNA splicing and/or exon inclusion or exclusion. In some embodiments, provided oligonucleotides comprise any nucleobase described herein or known in the art.

[0402] In some embodiments, a nucleobase present in a provided oligonucleotide is a natural nucleobase or a modified nucleobase derived from a natural nucleobase. Examples include, but are not limited to, uracil, thymine, adenine, cytosine, and guanine having their respective amino groups protected by acyl protecting groups, 2-fluorouracil, 2-fluorocytosine, 5-bromouracil, 5-iodouracil, 2,6-diaminopurine, azacytosine, pyrimidine analogs such as pseudoisocytosine and pseudouracil and other modified nucleobases such as 8-substituted purines, xanthine, or hypoxanthine (the latter two being the natural degradation products). Example modified nucleobases are disclosed in Chiu and Rana, RNA, 2003, 9, 1034-1048, Limbach et al. Nucleic Acids Research, 1994, 22, 2183-2196 and Revankar and Rao, Comprehensive Natural Products Chemistry, vol. 7, 313. In some embodiments, a modified nucleobase is substituted uracil, thymine, adenine, cytosine, or guanine. In some embodiments, a modified nucleobase is a functional replacement, e.g., in terms of hydrogen bonding and/or base pairing, of uracil, thymine, adenine, cytosine, or guanine. In some embodiments, a nucleobase is optionally substituted uracil, thymine, adenine, cytosine, 5-methylcytosine, or guanine. In some embodiments, a nucleobase is uracil, thymine, adenine, cytosine, 5-methylcytosine, or guanine.

[0403] In some embodiments, a modified base is optionally substituted adenine, cytosine, guanine, thymine, or uracil. In some embodiments, a modified nucleobase is independently adenine, cytosine, guanine, thymine or uracil, modified by one or more modifications by which:

[0404] (1) a nucleobase is modified by one or more optionally substituted groups independently selected from acyl, halogen, amino, azide, alkyl, alkenyl, alkynyl, aryl, heteroalkyl, heteroalkenyl, heteroalkynyl, heterocyclyl, heteroaryl, carboxyl, hydroxyl, biotin, avidin, streptavidin, substituted silyl, and combinations thereof;

[0405] (2) one or more atoms of a nucleobase are independently replaced with a different atom selected from carbon, nitrogen and sulfur;

[0406] (3) one or more double bonds in a nucleobase are independently hydrogenated; or

[0407] (4) one or more aryl or heteroaryl rings are independently inserted into a nucleobase.

[0408] Various additional nucleobases are described in the art. Sugars

[0409] In some embodiments, provided oligonucleotides are capable of directing a decrease in the expression and/or level of a target gene or its gene product. In some embodiments, provided oligonucleotides are capable of directing a decrease in the expression and/or level of a target gene or its gene product via RNA interference. In some embodiments, provided oligonucleotides are capable of directing a decrease in the expression and/or level of a target gene or its gene product via a biochemical mechanism which does not involve RNA interference or RISC (including, but not limited to, RNaseH-mediated knockdown or steric hindrance of gene expression). In some embodiments, provided oligonucleotides are capable of directing a decrease in the expression and/or level of a target gene or its gene product via RNA interference and/or RNase H-mediated knockdown. In some embodiments, provided oligonucleotides are capable of directing a decrease in the expression and/or level of a target gene or its gene product by sterically blocking translation after annealing to a target gene mRNA, and/or by altering or interfering with mRNA splicing and/or exon inclusion or exclusion. In some embodiments, provided oligonucleotides comprise any sugar described herein or known in the art.

[0410] In some embodiments, provided oligonucleotides capable of directing single-stranded RNA interference comprise one or more modified sugar moieties beside the natural sugar moieties.

[0411] The most common naturally occurring nucleotides are comprised of ribose sugars linked to the nucleobases adenosine (A), cytosine (C), guanine (G), and thymine (T) or uracil (U). Also contemplated are modified nucleotides wherein a phosphate group or linkage phosphorus in the nucleotides can be linked to various positions of a sugar or modified sugar. As non-limiting examples, the phosphate group or linkage phosphorus can be linked to the 2″, 3″, 4″ or 5″ hydroxyl moiety of a sugar or modified sugar. Nucleotides that incorporate modified nucleobases as described herein are also contemplated in this context. In some embodiments, nucleotides or modified nucleotides comprising an unprotected —OH moiety are used in accordance with methods of the present disclosure.

[0412] In some embodiments, an APOC3 oligonucleotide, an APOC3 oligonucleotide that directs RNA interference, an APOC3 oligonucleotide that directs RNase H-mediated knockdown, or an APOC3 oligonucleotide that directs both RNA interference and RNase H-mediated knockdown can comprise any base (nucleobase), modified base or base analog described herein or known in the art. In some embodiments, an APOC3 oligonucleotide, an APOC3 oligonucleotide that directs RNA interference, an APOC3 oligonucleotide that directs RNase H-mediated knockdown, or an APOC3 oligonucleotide that directs both RNA interference and RNase H-mediated knockdown can comprise any base described herein or known in the art in combination with any other structural element or modification described herein, including but not limited to, base sequence or portion thereof, sugar; internucleotidic linkage; stereochemistry or pattern thereof; additional chemical moiety, including but not limited to, a targeting moiety, lipid moiety, a GalNAc moiety, etc.; 5′-end structure; 5′-end region; 5′ nucleotide moiety; seed region; post-seed region; 3′-end region; 3′-terminal dinucleotide; 3′-end cap; pattern of modifications of sugars, bases or internucleotidic linkages; format or any structural element thereof, and/or any other structural element or modification described herein; and in some embodiments, the present disclosure pertains to multimers of any such oligonucleotides.

[0413] In some embodiments, an APOC3 oligonucleotide, an APOC3 oligonucleotide that directs RNA interference, an APOC3 oligonucleotide that directs RNase H-mediated knockdown, or an APOC3 oligonucleotide that directs both RNA interference and RNase H-mediated knockdown can comprise any sugar.

[0414] Various additional sugars are described in the art.

[0415] Base Sequence of an APOC3 Oligonucleotide

[0416] In some embodiments, provided oligonucleotides are capable of directing a decrease in the expression and/or level of a target gene or its gene product. In some embodiments, provided oligonucleotides are capable of directing a decrease in the expression and/or level of a target gene or its gene product via RNA interference. In some embodiments, provided oligonucleotides are capable of directing a decrease in the expression and/or level of a target gene or its gene product via a biochemical mechanism which does not involve RNA interference or RISC (including, but not limited to, RNaseH-mediated knockdown or steric hindrance of gene expression). In some embodiments, provided oligonucleotides are capable of directing a decrease in the expression and/or level of a target gene or its gene product via RNA interference and/or RNase H-mediated knockdown. In some embodiments, provided oligonucleotides are capable of directing a decrease in the expression and/or level of a target gene or its gene product by sterically blocking translation after annealing to a target gene mRNA, and/or by altering or interfering with mRNA splicing and/or exon inclusion or exclusion. In some embodiments, provided oligonucleotides can comprise any base sequence or portion thereof, described herein, wherein a portion is a span of at least 15 contiguous bases, or a span of at least 15 contiguous bases with 1-5 mismatches.

[0417] In some embodiments, an APOC3 oligonucleotide, an APOC3 oligonucleotide that directs RNA interference, an APOC3 oligonucleotide that directs RNase H-mediated knockdown, or an APOC3 oligonucleotide that directs both RNA interference and RNase H-mediated knockdown can comprise any base sequence described herein. In some embodiments, an APOC3 oligonucleotide, an APOC3 oligonucleotide that directs RNA interference, an APOC3 oligonucleotide that directs RNase H-mediated knockdown, or an APOC3 oligonucleotide that directs both RNA interference and RNase H-mediated knockdown can comprise any base sequence or portion thereof, described herein. In some embodiments, an APOC3 oligonucleotide, an APOC3 oligonucleotide that directs RNA interference, an APOC3 oligonucleotide that directs RNase H-mediated knockdown, or an APOC3 oligonucleotide that directs both RNA interference and RNase H-mediated knockdown can comprise any base sequence or portion thereof, described herein, wherein a portion is a span of 15 contiguous bases, or a span of 15 contiguous bases with 1-5 mismatches.

[0418] The sequence of a single-stranded RNAi agent has a sufficient length and identity to a transcript target to mediate target-specific RNA interference. In some embodiments, the RNAi agent is complementary to a portion of a transcript target sequence.

[0419] The base sequence of a single-stranded RNAi agent is complementary to that of a target transcript. As used herein, “target transcript sequence,” “target sequence”, “target gene”, and the like, refer to a contiguous portion of the nucleotide sequence of an mRNA molecule formed during the transcription of a gene, e.g., a target gene, including mRNA that is a product of RNA processing of a primary transcription product.

[0420] The terms “complementary,” “fully complementary” and “substantially complementary” herein may be used with respect to the base matching between the strand of a single-stranded RNAi agent and a target sequence or between an antisense oligonucleotide and a target sequence, as will be understood from the context of their use. A strand of a single-stranded RNAi agent or antisense oligonucleotide or other oligonucleotide is complementary to that of a target sequence when each base of the single-stranded RNAi agent, antisense oligonucleotide or other oligonucleotide is capable of base-pairing with a sequential base on the target strand, when maximally aligned. As a non-limiting example, if a target sequence has, for example, a base sequence of 5′-GCAUAGCGAGCGAGGGAAAAC-3′ (SEQ ID NO: 1), an APOC3 oligonucleotide with a base sequence of 5′GUUUUCCCUCGCUCGCUAUGC-3′ (SEQ ID NO: 2) is complementary or fully complementary to such a target sequence. It is noted, of course, that substitution of T for U, or vice versa, does not alter the amount of complementarity.

[0421] As used herein, a polynucleotide that is “substantially complementary” to a target sequence is largely or mostly complementary but not 100% complementary. In some embodiments, a sequence (e.g., a strand of a single-stranded RNAi agent or an antisense oligonucleotide) which is substantially complementary has 1, 2, 3, 4 or 5 mismatches from a sequence which is 100% complementary to the target sequence. In the case of a single-stranded RNAi agent, this disclosure notes that the 5′ terminal nucleotide (N1) in many cases has a mismatch from the complement of a target sequence. Similarly, in a single-stranded RNAi agent, the 3′-terminal dinucleotide, if present, can be a mismatch from the complement of the target sequence. As a non-limiting example, if a target sequence has, for example, a base sequence of 5′-GCAUAGCGAGCGAGGGAAAAC-3′ (SEQ ID NO: 3), a single-stranded RNAi agent with a base sequence of 5′TUUUUCCCUCGCUCGCUAUTU-3′ (SEQ ID NO: 4) is substantially complementary to such a target sequence.

[0422] The present disclosure presents, in Table 1A and elsewhere, various single-stranded RNAi agents and antisense oligonucleotides and other oligonucleotides, each of which has a defined base sequence. In some embodiments, the disclosure encompasses any oligonucleotide having a base sequence which is, comprises, or comprises a portion of the base sequence of any various single-stranded RNAi agent, antisense oligonucleotide and other oligonucleotide disclosed herein. In some embodiments, the disclosure encompasses any oligonucleotide having a base sequence which is, comprises, or comprises a portion of the base sequence of any various single-stranded RNAi agent, antisense oligonucleotide and other oligonucleotide disclosed herein, which has any chemical modification, stereochemistry, format, structural feature (e.g., if the oligonucleotide is a single-stranded RNAi agent, the 5′-end structure, 5′-end region, 5′ nucleotide moiety, seed region, post-seed region, 3′-end region, 3′-terminal dinucleotide, 3′-end cap, or any structure, pattern or portion thereof), and/or any other modification described herein (e.g., conjugation with another moiety, such as a targeting moiety, carbohydrate moiety, a GalNAc moiety, lipid moiety, etc.; and/or multimerization).

[0423] In some embodiments, an APOC3 oligonucleotide has a base sequence which is, comprises or comprises a portion of the base sequence of any oligonucleotide disclosed herein.

[0424] In some embodiments, the present disclosure discloses an APOC3 oligonucleotide of a sequence recited herein. In some embodiments, the present disclosure discloses an APOC3 oligonucleotide of a sequence recited herein, wherein the oligonucleotide is capable of directing a decrease in the expression and/or level of a target gene or its gene product. In some embodiments, an APOC3 oligonucleotide of a recited sequence is a single-stranded RNAi agent. In some embodiments, an APOC3 oligonucleotide of a recited sequence is an antisense oligonucleotide which directs RNase H-mediated knockdown. In some embodiments, an APOC3 oligonucleotide of a recited sequence directs both RNA interference and RNase H-mediated knockdown. In some embodiments, an APOC3 oligonucleotide of a recited sequence comprises any structure described herein (e.g., any 5′-end structure, 5′-end region, 5′ nucleotide moiety, seed region, post-seed region, 3′-terminal dinucleotide, 3′-end cap, or any portion of any of these structures, or any chemistry, stereochemistry, additional chemical moiety, etc., described herein). If the oligonucleotide is a ssRNAi agent, the sequence can be preceded by a T (as a non-limiting example, a 2′-deoxy T, 5′-(R)-Me OH T, 5′-(R)-Me PO T, 5′-(R)-Me PS T, 5′-(R)-Me PH T, 5′-(S)-Me OH T, 5′-(S)-Me PO T, 5′-(S)-Me PS T, or 5′-(S)—PH T) or the first nucleobase is replaced by a T (as a non-limiting example, a 2′-deoxy T, 5′-(R)-Me OH T, 5′-(R)-Me PO T, 5′-(R)-Me PS T, 5′-(R)-Me PH T, 5′-(S)-Me OH T, 5′-(S)-Me PO T, 5′-(S)-Me PS T, or 5′-(S)—PH T) and/or followed by a 3′-terminal dinucleotide (e.g., as non-limiting examples: TT, UU, TU, etc.). In various sequences, U can be replaced by T or vice versa, or a sequence can comprise a mixture of U and T. In some embodiments, an APOC3 oligonucleotide has a length of no more than about 49, 45, 40, 30, 35, 25, 23 total nucleotides. In some embodiments, a portion is a span of at least 15, 16, 17, 18, 19, 20, 21, 22, 23, 24, or 25 total nucleotides with 0-3 mismatches. In some embodiments, a portion is a span of at least 15, 16, 17, 18, 19, 20, 21, 22, 23, 24, or 25 total nucleotides with 0-3 mismatches, wherein a span with 0 mismatches is complementary and a span with 1 or more mismatches is a non-limiting example of substantial complementarity. In some embodiments, wherein the sequence recited above starts with a U at the 5′-end, the U can be deleted and/or replaced by another base. In some embodiments, the disclosure encompasses any oligonucleotide having a base sequence which is or comprises or comprises a portion of the base sequence of any oligonucleotide disclosed herein, which has a format or a portion of a format disclosed herein.

[0425] In some embodiments, an APOC3 oligonucleotide, an APOC3 oligonucleotide that directs RNA interference, an APOC3 oligonucleotide that directs RNase H-mediated knockdown, or an APOC3 oligonucleotide that directs both RNA interference and RNase H-mediated knockdown can comprise any base sequence described herein. In some embodiments, an APOC3 oligonucleotide, an APOC3 oligonucleotide that directs RNA interference, an APOC3 oligonucleotide that directs RNase H-mediated knockdown, or an APOC3 oligonucleotide that directs both RNA interference and RNase H-mediated knockdown can comprise any base sequence or portion thereof, described herein. In some embodiments, an APOC3 oligonucleotide, an APOC3 oligonucleotide that directs RNA interference, an APOC3 oligonucleotide that directs RNase H-mediated knockdown, or an APOC3 oligonucleotide that directs both RNA interference and RNase H-mediated knockdown can comprise any base sequence or portion thereof, described herein, wherein a portion is a span of 15 contiguous bases, or a span of 15 contiguous bases with 1-5 mismatches. In some embodiments, an APOC3 oligonucleotide, an APOC3 oligonucleotide that directs RNA interference, an APOC3 oligonucleotide that directs RNase H-mediated knockdown, or an APOC3 oligonucleotide that directs both RNA interference and RNase H-mediated knockdown can comprise any base sequence or portion thereof described herein in combination with any other structural element or modification described herein, including but not limited to, sugar, base; internucleotidic linkage; stereochemistry or pattern thereof; additional chemical moiety, including but not limited to, a targeting moiety, lipid moiety, a GalNAc moiety, etc.; 5′-end structure; 5′-end region; 5′ nucleotide moiety; seed region; post-seed region; 3′-end region; 3′-terminal dinucleotide; 3′-end cap; pattern of modifications of sugars, bases or internucleotidic linkages; format or any structural element thereof, and/or any other structural element or modification described herein; and in some embodiments, the present disclosure pertains to multimers of any such oligonucleotides.

[0426] Non-limiting examples of oligonucleotides having various base sequences are disclosed in Table 1A, below.

TABLE 1A
Oligonucleotides.
APOC3 oligonucleotides.

| | | | | SEQ |
|---|---|---|---|---|
| | | | | ID |
| ID | Naked Sequence | Sequence | Stereochemistry | NO: |
| WV- | AAUACUGUCCCUUUUAAG | rA rA rU rA rC rU rG rU rC rC rC rU rU rU rU rA rA | OOOOOOOOOOOOOOOO | 5 |
| 1161 | CUU | rG rCmUmU | OOOO | |
| WV- | AAUACUGUCCCUUUUAAG | rA * rA rU rA rC rU rG rU rC rC rC rU rU rU rU rA | XOOOOOOOOOOOOOOO | 6 |
| 1162 | CUU | rA rG rCmUmU | OOOO | |
| WV- | AAUACUGUCCCUUUUAAG | rA rA * rU rA rC rU rG rU rC rC rC rU rU rU rU rA | OXOOOOOOOOOOOOOO | 7 |
| 1163 | CUU | rA rG rCmUmU | OOOO | |
| WV- | AAUACUGUCCCUUUUAAG | rA rA rU * rA rC rU rG rU rC rC rC rU rU rU rU rA | OOXOOOOOOOOOOOOO | 8 |
| 1164 | CUU | rA rG rCmUmU | OOOO | |
| WV- | AAUACUGUCCCUUUUAAG | rA rA rU rA * rC rU rG rU rC rC rC rU rU rU rU rA | OOOXOOOOOOOOOOOO | 9 |
| 1165 | CUU | rA rG rCmUmU | OOOO | |
| WV- | AAUACUGUCCCUUUUAAG | rA rA rU rA rC * rU rG rU rC rC rC rU rU rU rU rA | OOOOXOOOOOOOOOOO | 10 |
| 1166 | CUU | rA rG rCmUmU | OOOO | |
| WV- | AAUACUGUCCCUUUUAAG | rA rA rU rA rC rU * rG rU rC rC rC rU rU rU rU rA | OOOOOXOOOOOOOOOO | 11 |
| 1167 | CUU | rA rG rCmUmU | OOOO | |
| WV- | AAUACUGUCCCUUUUAAG | rA rA rU rA rC rU rG * rU rC rC rC rU rU rU rU rA | OOOOOOXOOOOOOOOO | 12 |
| 1168 | CUU | rA rG rCmUmU | OOOO | |
| WV- | AAUACUGUCCCUUUUAAG | rA rA rU rA rC rU rG rU * rC rC rC rU rU rU rU rA | OOOOOOOXOOOOOOOO | 13 |
| 1169 | CUU | rA rG rCmUmU | OOOO | |
| WV- | AAUACUGUCCCUUUUAAG | rA rA rU rA rC rU rG rU rC * rC rC rU rU rU rU rA | OOOOOOOOXOOOOOOO | 14 |
| 1170 | CUU | rA rG rCmUmU | OOOO | |
| WV- | AAUACUGUCCCUUUUAAG | rA rA rU rA rC rU rG rU rC rC * rC rU rU rU rU rA | OOOOOOOOOXOOOOOO | 15 |
| 1171 | CUU | rA rG rCmUmU | OOOO | |
| WV- | AAUACUGUCCCUUUUAAG | rA rA rU rA rC rU rG rU rC rC rC * rU rU rU rU rA | OOOOOOOOOOOXOOOO | 16 |
| 1172 | CUU | rA rG rCmUmU | OOOO | |
| WV- | AAUACUGUCCCUUUUAAG | rA rA rU rA rC rU rG rU rC rC rC rU * rU rU rU rA | OOOOOOOOOOOXOOOO | 17 |
| 1173 | CUU | rA rG rCmUmU | OOOO | |
| WV- | AAUACUGUCCCUUUUAAG | rA rA rU rA rC rU rG rU rC rC rC rU rU * rU rU rA | OOOOOOOOOOOOXOOO | 18 |
| 1174 | CUU | rA rG rCmUmU | OOOO | |
| WV- | AAUACUGUCCCUUUUAAG | rA rA rU rA rC rU rG rU rC rC rC rU rU rU * rU rA | OOOOOOOOOOOOOXOO | 19 |
| 1175 | CUU | rA rG rCmUmU | OOOO | |
| WV- | AAUACUGUCCCUUUUAAG | rA rA rU rA rC rU rG rU rC rC rC rU rU rU rU * rA | OOOOOOOOOOOOOOXO | 20 |
| 1176 | CUU | rA rG rCmUmU | OOOO | |
| WV- | AAUACUGUCCCUUUUAAG | rA rA rU rA rC rU rG rU rC rC rC rU rU rU rU rA * | OOOOOOOOOOOOOOOX | 21 |
| 1177 | CUU | rA rG rCmUmU | OOOO | |
| WV- | AAUACUGUCCCUUUUAAG | rA rA rU rA rC rU rG rU rC rC rC rU rU rU rU rA rA | OOOOOOOOOOOOOOOO | 22 |
| 1178 | CUU | * rG rCmUmU | XOOO | |
| WV- | AAUACUGUCCCUUUUAAG | rA rA rU rA rC rU rG rU rC rC rC rU rU rU rU rA rA | OOOOOOOOOOOOOOOO | 23 |
| 1179 | CUU | rG * rCmUmU | OXOO | |
| WV- | AAUACUGUCCCUUUUAAG | rA rA rU rA rC rU rG rU rC rC rC rU rU rU rU rA rA | OOOOOOOOOOOOOOOO | 24 |
| 1180 | CUU | rG rC * mUmU | OOXO | |
| WV- | AAUACUGUCCCUUUUAAG | rA rA rU rA rC rU rG rU rC rC rC rU rU rU rU rA rA | OOOOOOOOOOOOOOOO | 25 |
| 1181 | CUU | rG rCmU * mU | OOOX | |
| WV- | GCUUAAAAGGGACAGUAU | rG rC rU rU rA rA rA rA rG rG rG rA rC rA rG rU rA | OOOOOOOOOOOOOOOO | 26 |
| 1182 | UUU | rU rUmUmU | OOOO | |
| WV- | GUGCAUCCUUGGCGGUCU | PO fGmU fGmC fAmU fCmC fUmU fGmG fCmG | OOOOOOOOOOOOOOOO | 27 |
| 1237 | UUU | fGmU fCmU fUmUmU | OOOO | |
| WV- | GUGCAUCCUUGGCGGUCU | PO fG * mU fG * mC fA * mU fC * mC fU * mU fG | XOXOXOXOXOXOXOXOXO | 28 |
| 1238 | UUU | * mG fC * mG fG * mU fC * mU fU * mUmU | XO | |
| WV- | GUGCAUCCUUGGCGGUCU | PO rG fU rG fC rA fU fC fC fU fU rG rG fC rG rG fU | OOOOOOOOOOOOOOOO | 29 |
| 1239 | UUU | fC fU fUmUmU | OOOO | |
| WV- | GUGCAUCCUUGGCGGUCU | PO fGmU fGmC fAmU fCmC fUmU fGmG fCmG * | OOOOOOOOOOOOOXXXX | 30 |
| 1240 | UUU | fG * mU * fC * mU * fU * mU * mU | XXX | |
| WV- | GUCCCAGGUGGCCCAGCA | rG rU rC rC rC rA rG rG rU rG rG rC rC rC rA rG rC | OOOOOOOOOOOOOOOO | 31 |
| 1241 | GUU | rA rGmUmU | OOOO | |
| WV- | CUGCUGGGCCACCUGGGA | PO fCmU fGmC fUmG fGmG fCmC fAmC fCmU | OOOOOOOOOOOOOOOO | 32 |
| 1242 | CUU | fGmG fGmA fCmUmU | OOOO | |
| WV- | CUGCUGGGCCACCUGGGA | PO fC * mU fG * mC fU * mG fG * mG fC * mC fA | XOXOXOXOXOXOXOXOXO | 33 |
| 1243 | CUU | * mC fC * mU fG * mG fG * mA fC * mUmU | XO | |
| WV- | CUGCUGGGCCACCUGGGA | PO fC fU rG fC fU rG rG rG fC fC rA fC fC fU rG rG | OOOOOOOOOOOOOOOO | 34 |
| 1244 | CUU | rG rA fCmUmU | OOOO | |
| WV- | CUGCUGGGCCACCUGGGA | PO fCmU fGmC fUmG fGmG fCmC fAmC fCmU * | OOOOOOOOOOOOOXXXX | 35 |
| 1245 | CUU | fG * mG * fG * mA * fC * mU * mU | XXX | |
| WV- | GACCCUGAGGUCAGACCA | rG rA rC rC rC rU rG rA rG rG rU rC rA rG rA rC rC | OOOOOOOOOOOOOOOO | 36 |
| 1246 | AUU | rA rAmUmU | OOOO | |
| WV- | UUGGUCUGACCUCAGGGU | PO rU rU rG rG rU rC rU rG rA rC rC rU rC rA rG | OOOOOOOOOOOOOOOO | 37 |
| 1247 | CUU | rG rG rU rCmUmU | OOOO | |
| WV- | UUGGUCUGACCUCAGGGU | PO fUmU fGmG fUmC fUmG fAmC fCmU fCmA | OOOOOOOOOOOOOOOO | 38 |
| 1248 | CUU | fGmG fGmU fCmUmU | OOOO | |
| WV- | UUGGUCUGACCUCAGGGU | PO fU * mU fG * mG fU * mC fU * mG fA * mC fC | XOXOXOXOXOXOXOXOXO | 39 |
| 1249 | CUU | * mU fC * mA fG * mG fG * mU fC * mUmU | XO | |
| WV- | UUGGUCUGACCUCAGGGU | PO fU * mU * fG * mG * fU * mC * fU * mG * fA | XXXXXXXXXXXXXXXXXXXX | 40 |
| 1250 | CUU | * mC * fC * mU * fC * mA * fG * mG * fG * mU * | | |
| | | fC * mU * mU | | |
| WV- | UUGGUCUGACCUCAGGGU | PO fU fU rG rG fU fC fU rG rA fC fC fU fC rA rG rG | OOOOOOOOOOOOOOOO | 41 |
| 1251 | CUU | rG fU fCmUmU | OOOO | |
| WV- | UUGGUCUGACCUCAGGGU | PO fUmU fGmG fUmC fUmG fAmC fCmU fCmA * | OOOOOOOOOOOOOXXXX | 42 |
| 1252 | CUU | fG * mG * fG * mU * fC * mU * mU | XXX | |
| WV- | CCUCCAGGCAUGCUGGCC | rC rC rU rC rC rA rG rG rC rA rU rG rC rU rG rG rC | OOOOOOOOOOOOOOOO | 43 |
| 1253 | UUU | rC rUmUmU | OOOO | |
| WV- | AGGCCAGCAUGCCUGGAG | PO fAmG fGmC fCmA fGmC fAmU fGmC fCmU | OOOOOOOOOOOOOOOO | 44 |
| 1254 | GUU | fGmG fAmG fGmUmU | OOOO | |
| WV- | AGGCCAGCAUGCCUGGAG | PO fA * mG fG * mC fC * mA fG * mC fA * mU fG | XOXOXOXOXOXOXOXOXO | 45 |
| 1255 | GUU | * mC fC * mU fG * mG fA * mG fG * mUmU | XO | |
| WV- | AGGCCAGCAUGCCUGGAG | PO rA rG rG fC fC rA rG fC rA fU rG fC fC fU rG rG | OOOOOOOOOOOOOOOO | 46 |
| 1256 | GUU | rA rG rGmUmU | OOOO | |
| WV- | AGGCCAGCAUGCCUGGAG | PO fAmG fGmC fCmA fGmC fAmU fGmC fCmU * | OOOOOOOOOOOOOXXXX | 47 |
| 1257 | GUU | fG * mG * fA * mG * fG * mU * mU | XXX | |
| WV- | GUGCAGGAGUCCCAGGUG | rG rU rG rC rA rG rG rA rG rU rC rC rC rA rG rG | OOOOOOOOOOOOOOOO | 48 |
| 1258 | GUU | rU rG rGmUmU | OOOO | |
| WV- | CCACCUGGGACUCCUGCA | PO fCmC fAmC fCmU fGmG fGmA fCmU fCmC | OOOOOOOOOOOOOOOO | 49 |
| 1259 | CUU | fUmG fCmA fCmUmU | OOOO | |
| WV- | CCACCUGGGACUCCUGCA | PO fC * mC fA * mC fC * mU fG * mG fG * mA fC | XOXOXOXOXOXOXOXOXO | 50 |
| 1260 | CUU | * mU fC * mC fU * mG fC * mAfC * mUmU | XO | |
| WV- | CCACCUGGGACUCCUGCA | PO fC fC rA fC fC fU rG rG rG rA fC fU fC fC fU rG | OOOOOOOOOOOOOOOO | 51 |
| 1261 | CUU | fC rA fCmUmU | OOOO | |
| WV- | CCACCUGGGACUCCUGCA | PO fCmC fAmC fCmU fGmG fGmA fCmU fCmC * | OOOOOOOOOOOOOXXXX | 52 |
| 1262 | CUU | fU * mG * fC * mA * fC * mU * mU | XXX | |
| WV- | GGGCUGGGUGACCGAUG | rG rG rG rC rU rG rG rG rU rG rA rC rC rG rA rU | OOOOOOOOOOOOOOOO | 53 |
| 1263 | GCUU | rG rG rCmUmU | OOOO | |
| WV- | GCCAUCGGUCACCCAGCCC | PO fGmC fCmA fUmC fGmG fUmC fAmC fCmC | OOOOOOOOOOOOOOOO | 54 |
| 1264 | UU | fAmG fCmC fCmUmU | OOOO | |
| WV- | GCCAUCGGUCACCCAGCCC | PO fG * mC fC * mA fU * mC fG * mG fU * mC fA | XOXOXOXOXOXOXOXOXO | 55 |
| 1265 | UU | * mC fC * mC fA * mG fC * mC fC * mUmU | XO | |
| WV- | GCCAUCGGUCACCCAGCCC | PO rG fC fC rA fU fC rG rG fU fC rA fC fC fC rA rG | OOOOOOOOOOOOOOOO | 56 |
| 1266 | UU | fC fC fCmUmU | OOOO | |
| WV- | GCCAUCGGUCACCCAGCCC | PO fGmC fCmA fUmC fGmG fUmC fAmC fCmC * | OOOOOOOOOOOOOXXXX | 57 |
| 1267 | UU | fA * mG * fC * mC * fC * mU * mU | XXX | |
| WV- | GCCUCCCAAUAAAGCUGG | rG rC rC rU rC rC rC rA rA rU rA rA rA rG rC rU rG | OOOOOOOOOOOOOOO | 58 |
| 1268 | AUU | rG rAmUmU | OOOO | |
| WV- | UCCAGCUUUAUUGGGAG | PO fUmC fCmA fGmC fUmU fUmA fUmU fGmG | OOOOOOOOOOOOOOOO | 59 |
| 1269 | GCUU | fGmA fGmG fCmUmU | OOOO | |
| WV- | UCCAGCUUUAUUGGGAG | PO fU * mC fC * mA fG * mC fU * mU fU * mA fU | XOXOXOXOXOXOXOXOXO | 60 |
| 1270 | GCUU | * mU fG * mG fG * mA fG * mG fC * mUmU | XO | |
| WV- | UCCAGCUUUAUUGGGAG | PO fU fC fC rA rG fC fU fU fU rA fU fU rG rG rG rA | OOOOOOOOOOOOOOOO | 61 |
| 1271 | GCUU | rG rG fCmUmU | OOOO | |
| WV- | UCCAGCUUUAUUGGGAG | PO fUmC fCmA fGmC fUmU fUmA fUmU fGmG * | OOOOOOOOOOOOOXXXX | 62 |
| 1272 | GCUU | fG * mA * fG * mG * fC * mU * mU | XXX | |
| WV- | CCGUGGCUGCCUGAGACC | rC rC rG rU rG rG rC rU rG rC rC rU rG rA rG rA rC | OOOOOOOOOOOOOOOO | 63 |
| 1273 | UUU | rC rUmUmU | OOOO | |
| WV- | AGGUCUCAGGCAGCCACG | PO fAmG fGmU fCmU fCmA fGmG fCmA fGmC | OOOOOOOOOOOOOOOO | 64 |
| 1274 | GUU | fCmA fCmG fGmUmU | OOOO | |
| WV- | AGGUCUCAGGCAGCCACG | PO fA * mG fG * mU fC * mU fC * mA fG * mG fC | XOXOXOXOXOXOXOXOXO | 65 |
| 1275 | GUU | * mA fG * mC fC * mA fC * mG fG * mUmU | XO | |
| WV- | AGGUCUCAGGCAGCCACG | PO rA rG rG fU fC fU fC rA rG rG fC rA rG fC fC rA | OOOOOOOOOOOOOOOO | 66 |
| 1276 | GUU | fC rG rGmUmU | OOOO | |
| WV- | AGGUCUCAGGCAGCCACG | PO fAmG fGmU fCmU fCmA fGmG fCmA fGmC * | OOOOOOOOOOOOOXXXX | 67 |
| 1277 | GUU | fC * mA * fC * mG * fG * mU * mU | XXX | |
| WV- | GCUUAAAAGGGACAGUAU | rG rC rU rU rA rA rA rA rG rG rG rA rC rA rG rU rA | OOOOOOOOOOOOOOOO | 68 |
| 1278 | UUU | rU rUmUmU | OOOO | |
| WV- | AAUACUGUCCCUUUUAAG | PO rA rA rU rA rC rU rG rU rC rC rC rU rU rU rU rA | OOOOOOOOOOOOOOOO | 69 |
| 1279 | CUU | rA rG rCmUmU | OOOO | |
| WV- | AAUACUGUCCCUUUUAAG | PO fAmA fUmA fCmU fGmU fCmC fCmU fUmU | OOOOOOOOOOOOOOOO | 70 |
| 1280 | CUU | fUmA fAmG fCmUmU | OOOO | |
| WV- | AAUACUGUCCCUUUUAAG | PO fA * mA fU * mA fC * mU fG * mU fC * mC fC | XOXOXOXOXOXOXOXOXO | 71 |
| 1281 | CUU | * mU fU * mU fU * mA fA * mG fC * mUmU | XO | |
| WV- | AAUACUGUCCCUUUUAAG | PO fA * mA * fU * mA * fC * mU * fG * mU * fC * | XXXXXXXXXXXXXXXXXXXX | 72 |
| 1282 | CUU | mC * fC * mU * fU * mU * fU * mA * fA * mG * | | |
| | | fC * mU * mU | | |
| WV- | AAUACUGUCCCUUUUAAG | PO rA rA fU rA fC fU rG fU fC fC fC fU fU fU fU rA | OOOOOOOOOOOOOOOO | 73 |
| 1283 | CUU | rA rG fCmUmU | OOOO | |
| WV- | AAUACUGUCCCUUUUAAG | PO fAmA fUmA fCmU fGmU fCmC fCmU fUmU * | OOOOOOOOOOOOOXXXX | 74 |
| 1284 | CUU | fU * mA * fA * mG * fC * mU * mU | XXX | |
| WV- | GGGACAGTATTCTCAGTGA | rG rG rG rA rC rA rG rT rA rT rT rC rT rC rA rG rT | OOOOOOOOOOOOOOOO | 75 |
| 1285 | UU | rG rAmUmU | OOOO | |
| WV- | UCACUGAGAAUACUGUCC | PO rU rC rA rC rU rG rA rG rA rA rU rA rC rU rG rU | OOOOOOOOOOOOOOOO | 76 |
| 1286 | CUU | rC rC rCmUmU | OOOO | |
| WV- | UCACUGAGAAUACUGUCC | PO fUmC fAmC fUmG fAmG fAmA fUmA fCmU | OOOOOOOOOOOOOOOO | 77 |
| 1287 | CUU | fGmU fCmC fCmUmU | OOOO | |
| WV- | UCACUGAGAAUACUGUCC | PO fU * mC fA * mC fU * mG fA * mG fA * mA fU | XOXOXOXOXOXOXOXOXO | 78 |
| 1288 | CUU | * mA fC * mU fG * mU fC * mC fC * mUmU | XO | |
| WV- | UCACUGAGAAUACUGUCC | PO fU * mC * fAmC * fUmG * fAmG * fAmA * | XXOXOXOXOXOXOXOXOX | 79 |
| 1289 | CUU | fUmA * fCmU * fGmU * fCmC * fCmU * mU | OX | |
| WV- | UCACUGAGAAUACUGUCC | PO fU * mC * fA * mC * fU * mG * fA * mG * fA * | XXXXXXXXXXXXXXXXXXXX | 80 |
| 1290 | CUU | mA * fU * mA * fC * mU * fG * mU * fC * mC * fC | | |
| | | * mU * mU | | |
| WV- | UCACUGAGAAUACUGUCC | PO fU fC rA fC rU rG rA rG rA rA fU rA fC fU rG fU | OOOOOOOOOOOOOOOO | 81 |
| 1291 | CUU | fC fC fCmUmU | OOOO | |
| WV- | UCACUGAGAAUACUGUCC | PO fU * mC fAmC fUmG fAmG fAmA fUmA fCmU | XOOOOOOOOOOOXXXX | 82 |
| 1292 | CUU | * fG * mU * fC * mC * fC * mU * mU | XXX | |
| WV- | UCACUGAGAAUACUGUCC | PO fUmC fAmC fUmG fAmG fAmA fUmA fCmU * | OOOOOOOOOOOOOXXXX | 83 |
| 1293 | CUU | fG * mU * fC * mC * fC * mU * mU | XXX | |
| WV- | UCACUGAGAAUACUGUCC | PO fU * mC * fAmC fUmG fAmG fAmA fUmA | XXOOOOOOOOOOOXXXXX | 84 |
| 1294 | CUU | fCmU * fG * mU * fC * mC * fC * mU * mU | XX | |
| WV- | UCACUGAGAAUACUGUCC | PO fU * mC * fAmC * fUmG * fAmG * fAmA * | XXOXOXOXOXOXOXXXXXX | 85 |
| 1295 | CUU | fUmA * fCmU * fG * mU * fC * mC * fC * mU * | X | |
| | | mU | | |
| WV- | UCACUGAGAAUACUGUCC | POmU * fC * mA fC * mU fG * mA fG * mA fA * | XXOXOXOXOXOXOXXXXXX | 86 |
| 1296 | CUU | mU fA * mC fU * mG * fU * mC * fC * mC * | O | |
| | | mUmU | | |
| WV- | AAAGCUGGACAAGAAGCU | rA rA rA rG rC rU rG rG rA rC rA rA rG rA rA rG rC | OOOOOOOOOOOOOOOO | 87 |
| 1297 | AUU | rU rAmUmU | OOOO | |
| WV- | UAGCUUCUUGUCCAGCUU | PO fU rA rGmC rU rU rC rU rU rG rU rC rC rA rG | OOOOOOOOOOOOOOOO | 88 |
| 1298 | UUU | rC rU rU rUmUmU | OOOO | |
| WV- | UAGCUUCUUGUCCAGCUU | PO fUmA fGmC fUmU fCmU fUmG fUmC fCmA | OOOOOOOOOOOOOOOO | 89 |
| 1299 | UUU | fGmC fUmU fUmUmU | OOOO | |
| WV- | UAGCUUCUUGUCCAGCUU | PO fU * mA fG * mC fU * mU fC * mU fU * mG fU | XOXOXOXOXOXOXOXOXO | 90 |
| 1300 | UUU | * mC fC * mA fG * mC fU * mU fU * mUmU | XO | |
| WV- | UAGCUUCUUGUCCAGCUU | PO fU * mA * fGmC * fUmU * fCmU * fUmG * | XXOXOXOXOXOXOXOXOX | 91 |
| 1301 | UUU | fUmC * fCmA * fGmC * fUmU * fUmU * mU | OX | |
| WV- | UAGCUUCUUGUCCAGCUU | PO fU * mA * fG * mC * fU * mU * fC * mU * fU * | XXXXXXXXXXXXXXXXXXXX | 92 |
| 1302 | UUU | mG * fU * mC * fC * mA * fG * mC * fU * mU * | | |
| | | fU * mU * mU | | |
| WV- | UAGCUUCUUGUCCAGCUU | PO fU rA rG fC fU fU fC fU fU rG fU fC fC rA rG fC | OOOOOOOOOOOOOOOO | 93 |
| 1303 | UUU | fU fU fUmUmU | OOOO | |
| WV- | UAGCUUCUUGUCCAGCUU | PO fU * mA fGmC fUmU fCmU fUmG fUmC fCmA | XOOOOOOOOOOOOXXXX | 94 |
| 1304 | UUU | * fG * mC * fU * mU * fU * mU * mU | XXX | |
| WV- | UAGCUUCUUGUCCAGCUU | PO fUmA fGmC fUmU fCmU fUmG fUmC fCmA * | OOOOOOOOOOOOXXXX | 95 |
| 1305 | UUU | fG * mC * fU * mU * fU * mU * mU | XXX | |
| WV- | UAGCUUCUUGUCCAGCUU | PO fU * mA * fGmC fUmU fCmU fUmG fUmC | XXOOOOOOOOOOOXXXXX | 96 |
| 1306 | UUU | fCmA * fG * mC * fU * mU * fU * mU * mU | XX | |
| WV- | UAGCUUCUUGUCCAGCUU | PO fU * mA * fGmC * fUmU * fCmU * fUmG * | XXOXOXOXOXOXOXXXXXX | 97 |
| 1307 | UUU | fUmC * fCmA * fG * mC * fU * mU * fU * mU * | X | |
| | | mU | | |
| WV- | UAGCUUCUUGUCCAGCUU | POmU * fA * mG fC * mU fU * mC fU * mU fG * | XXOXOXOXOXOXOXXXXXX | 98 |
| 1308 | UUU | mU fC * mC fA * mG * fC * mU * fU * mU * | O | |
| | | mUmU | | |
| WV- | GCUUCAGAGGCCGAGGAU | rG rC rU rU rC rA rG rA rG rG rC rC rG rA rG rG rA | OOOOOOOOOOOOOOOO | 99 |
| 1309 | GUU | rU rGmUmU | OOOO | |
| WV- | CAUCCUCGGCCUCUGAAG | PO fCmA fUmC fCmU fCmG fGmC fCmU fCmU | OOOOOOOOOOOOOOOO | 100 |
| 1310 | CUU | fGmA fAmG fCmUmU | OOOO | |
| WV- | CAUCCUCGGCCUCUGAAG | PO fC * mA fU * mC fC * mU fC * mG fG * mC fC | XOXOXOXOXOXOXOXOXO | 101 |
| 1311 | CUU | * mU fC * mU fG * mA fA * mG fC * mUmU | XO | |
| WV- | CAUCCUCGGCCUCUGAAG | PO fC rA fU fC fC fU fC rG rG fC fC fU fC fU rG rA | OOOOOOOOOOOOOOOO | 102 |
| 1312 | CUU | rA rG fCmUmU | OOOO | |
| WV- | CAUCCUCGGCCUCUGAAG | PO fCmA fUmC fCmU fCmG fGmC fCmU fCmU * | OOOOOOOOOOOOOXXXX | 103 |
| 1313 | CUU | fG * mA * fA * mG * fC * mU * mU | XXX | |
| WV- | AUGAAGCACGCCACCAAG | rA rU rG rA rA rG rC rA rC rG rC rC rA rC rC rA rA | OOOOOOOOOOOOOOOO | 104 |
| 1314 | AUU | rG rAmUmU | OOOO | |
| WV- | UCUUGGUGGCGUGCUUC | PO fUmC fUmU fGmG fUmG fGmC fGmU fGmC | OOOOOOOOOOOOOOOO | 105 |
| 1315 | AUUU | fUmU fCmA fUmUmU | OOOO | |
| WV- | UCUUGGUGGCGUGCUUC | PO fU * mC fU * mU fG * mG fU * mG fG * mC fG | XOXOXOXOXOXOXOXOXO | 106 |
| 1316 | AUUU | * mU fG * mC fU * mU fC * mA fU * mUmU | XO | |
| WV- | UCUUGGUGGCGUGCUUC | PO fU fC fU fU rG rG fU rG rG fC rG fU rG fC fU fU | OOOOOOOOOOOOOOOO | 107 |
| 1317 | AUUU | fC rA fUmUmU | OOOO | |
| WV- | UCUUGGUGGCGUGCUUC | PO fUmC fUmU fGmG fUmG fGmC fGmU fGmC * | OOOOOOOOOOOOOXXXX | 108 |
| 1318 | AUUU | fU * mU * fC * mA * fU * mU * mU | XXX | |
| WV- | UGAGGUCAGACCAACUUC | rU rG rA rG rG rU rC rA rG rA rC rC rA rA rC rU rU | OOOOOOOOOOOOOOOO | 109 |
| 1319 | AUU | rC rAmUmU | OOOO | |
| WV- | UGAAGUUGGUCUGACCUC | PO rU rG rA rA rG rU rU rG rG rU rC rU rG rA rC | OOOOOOOOOOOOOOOO | 110 |
| 1320 | AUU | rC rU rC rAmUmU | OOOO | |
| WV- | UGAAGUUGGUCUGACCUC | PO fUmG fAmA fGmU fUmG fGmU fCmU fGmA | OOOOOOOOOOOOOOOO | 111 |
| 1321 | AUU | fCmC fUmC fAmUmU | OOOO | |
| WV- | UGAAGUUGGUCUGACCUC | PO fU * mG fA * mA fG * mU fU * mG fG * mU fC | XOXOXOXOXOXOXOXOXO | 112 |
| 1322 | AUU | * mU fG * mA fC * mC fU * mC fA * mUmU | XO | |
| WV- | UGAAGUUGGUCUGACCUC | PO fU * mG * fA * mA * fG * mU * fU * mG * fG | XXXXXXXXXXXXXXXXXXXX | 113 |
| 1323 | AUU | * mU * fC * mU * fG * mA * fC * mC * fU * mC * | | |
| | | fA * mU * mU | | |
| WV- | UGAAGUUGGUCUGACCUC | PO fU rG rA rA rG fU fU rG rG fU fC fU rG rA fC fC | OOOOOOOOOOOOOOOO | 114 |
| 1324 | AUU | fU fC rAmUmU | OOOO | |
| WV- | UGAAGUUGGUCUGACCUC | PO fUmG fAmA fGmU fUmG fGmU fCmU fGmA * | OOOOOOOOOOOOOXXXX | 115 |
| 1325 | AUU | fC * mC * fU * mC * fA * mU * mU | XXX | |
| WV- | AGGGUUACAUGAAGCACG | rA rG rG rG rU rU rA rC rA rU rG rA rA rG rC rA rC | OOOOOOOOOOOOOOOO | 116 |
| 1326 | CUU | rG rCmUmU | OOOO | |
| WV- | GCGUGCUUCAUGUAACCC | PO fGmC fGmU fGmC fUmU fCmA fUmG fUmA | OOOOOOOOOOOOOOOO | 117 |
| 1327 | UUU | fAmC fCmC fUmUmU | OOOO | |
| WV- | GCGUGCUUCAUGUAACCC | PO fG * mC fG * mU fG * mC fU * mU fC * mA fU | XOXOXOXOXOXOXOXOXO | 118 |
| 1328 | UUU | * mG fU * mA fA * mC fC * mC fU * mUmU | XO | |
| WV- | GCGUGCUUCAUGUAACCC | PO rG fC rG fU rG fC fU fU fC rA fU rG fU rA rA fC | OOOOOOOOOOOOOOOO | 119 |
| 1329 | UUU | fC fC fUmUmU | OOOO | |
| WV- | GCGUGCUUCAUGUAACCC | PO fGmC fGmU fGmC fUmU fCmA fUmG fUmA * | OOOOOOOOOOOOOXXXX | 120 |
| 1330 | UUU | fA * mC * fC * mC * fU * mU * mU | XXX | |
| WV- | AAUACUGUCCCUUUUAAG | rA * R rA rU rA rC rU rG rU rC rC rC rU rU rU rU | ROOOOOOOOOOOOOOO | 121 |
| 1331 | CUU | rA rA rG rCmUmU | OOOO | |
| WV- | AAUACUGUCCCUUUUAAG | rA rA * R rU rA rC rU rG rU rC rC rC rU rU rU rU | OROOOOOOOOOOOOOO | 122 |
| 1332 | CUU | rA rA rG rCmUmU | OOOO | |
| WV- | AAUACUGUCCCUUUUAAG | rA rA rU * R rA rC rU rG rU rC rC rC rU rU rU rU | OOROOOOOOOOOOOOO | 123 |
| 1333 | CUU | rA rA rG rCmUmU | OOOO | |
| WV- | AAUACUGUCCCUUUUAAG | rA rA rU rA * R rC rU rG rU rC rC rC rU rU rU rU | OOOROOOOOOOOOOOO | 124 |
| 1334 | CUU | rA rA rG rCmUmU | OOOO | |
| WV- | AAUACUGUCCCUUUUAAG | rA rA rU rA rC * R rU rG rU rC rC rC rU rU rU rU | OOOOROOOOOOOOOOO | 125 |
| 1335 | CUU | rA rA rG rCmUmU | OOOO | |
| WV- | AAUACUGUCCCUUUUAAG | rA rA rU rA rC rU * R rG rU rC rC rC rU rU rU rU | OOOOOROOOOOOOOOO | 126 |
| 1336 | CUU | rA rA rG rCmUmU | OOOO | |
| WV- | AAUACUGUCCCUUUUAAG | rA rA rU rA rC rU rG * R rU rC rC rC rU rU rU rU | OOOOOOROOOOOOOOO | 127 |
| 1337 | CUU | rA rA rG rCmUmU | OOOO | |
| WV- | AAUACUGUCCCUUUUAAG | rA rA rU rA rC rU rG rU * R rC rC rC rU rU rU rU | OOOOOOOROOOOOOOO | 128 |
| 1338 | CUU | rA rA rG rCmUmU | OOOO | |
| WV- | AAUACUGUCCCUUUUAAG | rA rA rU rA rC rU rG rU rC * R rC rC rU rU rU rU | OOOOOOOOROOOOOOO | 129 |
| 1339 | CUU | rA rA rG rCmUmU | OOOO | |
| WV- | AAUACUGUCCCUUUUAAG | rA rA rU rA rC rU rG rU rC rC * R rC rU rU rU rU | OOOOOOOOOROOOOOO | 130 |
| 1340 | CUU | rA rA rG rCmUmU | OOOO | |
| WV- | AAUACUGUCCCUUUUAAG | rA rA rU rA rC rU rG rU rC rC rC * R rU rU rU rU | OOOOOOOOOOROOOOO | 131 |
| 1341 | CUU | rA rA rG rCmUmU | OOOO | |
| WV- | AAUACUGUCCCUUUUAAG | rA rA rU rA rC rU rG rU rC rC rC rU * R rU rU rU | OOOOOOOOOOOROOOO | 132 |
| 1342 | CUU | rA rA rG rCmUmU | OOOO | |
| WV- | AAUACUGUCCCUUUUAAG | rA rA rU rA rC rU rG rU rC rC rC rU rU * R rU rU | OOOOOOOOOOOOROOO | 133 |
| 1343 | CUU | rA rA rG rCmUmU | OOOO | |
| WV- | AAUACUGUCCCUUUUAAG | rA rA rU rA rC rU rG rU rC rC rC rU rU rU * R rU | OOOOOOOOOOOOOROO | 134 |
| 1344 | CUU | rA rA rG rCmUmU | OOOO | |
| WV- | AAUACUGUCCCUUUUAAG | rA rA rU rA rC rU rG rU rC rC rC rU rU rU rU * R | OOOOOOOOOOOOOORO | 135 |
| 1345 | CUU | rA rA rG rCmUmU | OOOO | |
| WV- | AAUACUGUCCCUUUUAAG | rA rA rU rA rC rU rG rU rC rC rC rU rU rU rU rA * | OOOOOOOOOOOOOOOR | 136 |
| 1346 | CUU | R rA rG rCmUmU | OOOO | |
| WV- | AAUACUGUCCCUUUUAAG | rA rA rU rA rC rU rG rU rC rC rC rU rU rU rU rA rA | OOOOOOOOOOOOOOOO | 137 |
| 1347 | CUU | * R rG rCmUmU | ROOO | |
| WV- | AAUACUGUCCCUUUUAAG | rA rA rU rA rC rU rG rU rC rC rC rU rU rU rU rA rA | OOOOOOOOOOOOOOOO | 138 |
| 1348 | CUU | rG * R rCmUmU | OROO | |
| WV- | AAUACUGUCCCUUUUAAG | rA rA rU rA rC rU rG rU rC rC rC rU rU rU rU rA rA | OOOOOOOOOOOOOOOO | 139 |
| 1349 | CUU | rG rC * RmUmU | OORO | |
| WV- | AAUACUGUCCCUUUUAAG | rA rA rU rA rC rU rG rU rC rC rC rU rU rU rU rA rA | OOOOOOOOOOOOOOOO | 140 |
| 1350 | CUU | rG rCmU * RmU | OOOR | |
| WV- | AAUACUGUCCCUUUUAAG | rA * S rA rU rA rC rU rG rU rC rC rC rU rU rU rU | SOOOOOOOOOOOOOOO | 141 |
| 1351 | CUU | rA rA rG rCmUmU | OOOO | |
| WV- | AAUACUGUCCCUUUUAAG | rA rA * S rU rA rC rU rG rU rC rC rC rU rU rU rU | OSOOOOOOOOOOOOOO | 142 |
| 1352 | CUU | rA rA rG rCmUmU | OOOO | |
| WV- | AAUACUGUCCCUUUUAAG | rA rA rU * S rA rC rU rG rU rC rC rC rU rU rU rU | OOSOOOOOOOOOOOOO | 143 |
| 1353 | CUU | rA rA rG rCmUmU | OOOO | |
| WV- | AAUACUGUCCCUUUUAAG | rA rA rU rA * S rC rU rG rU rC rC rC rU rU rU rU | OOOSOOOOOOOOOOOO | 144 |
| 1354 | CUU | rA rA rG rCmUmU | OOOO | |
| WV- | AAUACUGUCCCUUUUAAG | rA rA rU rA rC * S rU rG rU rC rC rC rU rU rU rU | OOOOSOOOOOOOOOOO | 145 |
| 1355 | CUU | rA rA rG rCmUmU | OOOO | |
| WV- | AAUACUGUCCCUUUUAAG | rA rA rU rA rC rU * S rG rU rC rC rC rU rU rU rU | OOOOOSOOOOOOOOOO | 146 |
| 1356 | CUU | rA rA rG rCmUmU | OOOO | |
| WV- | AAUACUGUCCCUUUUAAG | rA rA rU rA rC rU rG * S rU rC rC rC rU rU rU rU | OOOOOOSOOOOOOOOO | 147 |
| 1357 | CUU | rA rA rG rCmUmU | OOOO | |
| WV- | AAUACUGUCCCUUUUAAG | rA rA rU rA rC rU rG rU * S rC rC rC rU rU rU rU | OOOOOOOSOOOOOOOO | 148 |
| 1358 | CUU | rA rA rG rCmUmU | OOOO | |
| WV- | AAUACUGUCCCUUUUAAG | rA rA rU rA rC rU rG rU rC * S rC rC rU rU rU rU | OOOOOOOOSOOOOOOO | 149 |
| 1359 | CUU | rA rA rG rCmUmU | OOOO | |
| WV- | AAUACUGUCCCUUUUAAG | rA rA rU rA rC rU rG rU rC rC * S rC rU rU rU rU | OOOOOOOOOSOOOOOO | 150 |
| 1360 | CUU | rA rA rG rCmUmU | OOOO | |
| WV- | AAUACUGUCCCUUUUAAG | rA rA rU rA rC rU rG rU rC rC rC * S rU rU rU rU | OOOOOOOOOOSOOOOO | 151 |
| 1361 | CUU | rA rA rG rCmUmU | OOOO | |
| WV- | AAUACUGUCCCUUUUAAG | rA rA rU rA rC rU rG rU rC rC rC rU * S rU rU rU | OOOOOOOOOOOSOOOO | 152 |
| 1362 | CUU | rA rA rG rCmUmU | OOOO | |
| WV- | AAUACUGUCCCUUUUAAG | rA rA rU rA rC rU rG rU rC rC rC rU rU * S rU rU | OOOOOOOOOOOOSOOO | 153 |
| 1363 | CUU | rA rA rG rCmUmU | OOOO | |
| WV- | AAUACUGUCCCUUUUAAG | rA rA rU rA rC rU rG rU rC rC rC rU rU rU * S rU | OOOOOOOOOOOOOSOO | 154 |
| 1364 | CUU | rA rA rG rCmUmU | OOOO | |
| WV- | AAUACUGUCCCUUUUAAG | rA rA rU rA rC rU rG rU rC rC rC rU rU rU rU * S | OOOOOOOOOOOOOOSO | 155 |
| 1365 | CUU | rA rA rG rCmUmU | OOOO | |
| WV- | AAUACUGUCCCUUUUAAG | rA rA rU rA rC rU rG rU rC rC rC rU rU rU rU rA * | OOOOOOOOOOOOOOOS | 156 |
| 1366 | CUU | S rA rG rCmUmU | OOOO | |
| WV- | AAUACUGUCCCUUUUAAG | rA rA rU rA rC rU rG rU rC rC rC rU rU rU rU rA rA | OOOOOOOOOOOOOOOO | 157 |
| 1367 | CUU | * S rG rCmUmU | SOOO | |
| WV- | AAUACUGUCCCUUUUAAG | rA rA rU rA rC rU rG rU rC rC rC rU rU rU rU rA rA | OOOOOOOOOOOOOOOO | 158 |
| 1368 | CUU | rG * S rCmUmU | OSOO | |
| WV- | AAUACUGUCCCUUUUAAG | rA rA rU rA rC rU rG rU rC rC rC rU rU rU rU rA rA | OOOOOOOOOOOOOOOO | 159 |
| 1369 | CUU | rG rC * SmUmU | OOSO | |
| WV- | AAUACUGUCCCUUUUAAG | rA rA rU rA rC rU rG rU rC rC rC rU rU rU rU rA rA | OOOOOOOOOOOOOOOO | 160 |
| 1370 | CUU | rG rCmU * SmU | OOOS | |
| WV- | UCCAGCUUUAUUGGGAG | PO rU rC rC rA rG rC rU rU rU rA rU rU rG rG rG | OOOOOOOOOOOOOOOO | 161 |
| 1498 | GCUU | rA rG rG rCmUmU | OOOO | |
| WV- | AGGUCUCAGGCAGCCACG | PO rA rG rG rU rC rU rC rA rG rG rC rA rG rC rC rA | OOOOOOOOOOOOOOOO | 162 |
| 1499 | GUU | rC rG rGmUmU | OOOO | |
| WV- | AGGCCAGCAUGCCUGGAG | PO rA rG rG rC rC rA rG rC rA rU rG rC rC rU rG rG | OOOOOOOOOOOOOOOO | 163 |
| 1500 | GUU | rA rG rGmUmU | OOOO | |
| WV- | CCACCUGGGACUCCUGCA | PO rC rC rA rC rC rU rG rG rG rA rC rU rC rC rU rG | OOOOOOOOOOOOOOOO | 164 |
| 1501 | CUU | rC rA rCmUmU | OOOO | |
| WV- | GCCAUCGGUCACCCAGCCC | PO rG rC rC rA rU rC rG rG rU rC rA rC rC rC rA rG | OOOOOOOOOOOOOOOO | 165 |
| 1502 | UU | rC rC rCmUmU | OOOO | |
| WV- | GUGCAUCCUUGGCGGUCU | PO rG rU rG rC rA rU rC rC rU rU rG rG rC rG rG | OOOOOOOOOOOOOOOO | 166 |
| 1503 | UUU | rU rC rU rUmUmU | OOOO | |
| WV- | CUGCUGGGCCACCUGGGA | PO rC rU rG rC rU rG rG rG rC rC rA rC rC rU rG rG | OOOOOOOOOOOOOOOO | 167 |
| 1504 | CUU | rG rA rCmUmU | OOOO | |
| WV- | CAUCCUCGGCCUCUGAAG | PO rC rA rU rC rC rU rC rG rG rC rC rU rC rU rG rA | OOOOOOOOOOOOOOOO | 168 |
| 1505 | CUU | rA rG rCmUmU | OOOO | |
| WV- | UCUUGGUGGCGUGCUUC | PO rU rC rU rU rG rG rU rG rG rC rG rU rG rC rU | OOOOOOOOOOOOOOOO | 169 |
| 1506 | AUUU | rU rC rA rUmUmU | OOOO | |
| WV- | GCGUGCUUCAUGUAACCC | PO rG rC rG rU rG rC rU rU rC rA rU rG rU rA rA | OOOOOOOOOOOOOOOO | 170 |
| 1507 | UUU | rC rC rC rUmUmU | OOOO | |
| WV- | AAUACUGUCCCUUUUAAG | rA * rA * rU * rA * rC * rU * rG * rU * rC * rC * | XXXXXXXXXXXXXXXXXXXX | 171 |
| 1516 | CUU | rC * rU * rU * rU * rU * rA * rA * rG * rC * mU * | | |
| | | mU | | |
| WV- | GCUUAAAAGGGACAGUAU | rG rC rU rU rA rA rA rA rG rG rG rA rC rA rG rU rA | OOOOOOOOOOOOOOOO | 172 |
| 1652 | U | rU rU | OO | |
| WV- | GUUGCUUAAAAGGG | rG rU rU rG rC rU rU rA rA rA rA rG rG rG rA rC | OOOOOOOOOOO | 173 |
| 1653 | ACAGUAUUCUC | rA rG rU rA rU rU rC rU rC | OOOOOOOOOOOOO | |
| WV- | TCACTGAGAATACTGTCCC | VPTeo * fC * mA fC * mT fG * mA fG * mA fA * | XXOXOXOXOXOXOXXXXXX | 174 |
| 1783 | AA | mT fA * mC fT * mG * fT * mC * fC * mC * Aeo * | X | |
| | | Aeo | | |
| WV- | UCACUGAGAAUACUGUCC | VPUeo * fC * mA fC * mU fG * mA fG * mA fA * | XXOXOXOXOXOXOXXXXXX | 175 |
| 1784 | CAA | mU fA * mC fU * mG * fU * mC * fC * mC * Aeo * | X | |
| | | Aeo | | |
| WV- | UAGCUUCUUGUCCAGCUU | PO fU * fA * fGmC * fUmU * fCmU * fUmG * | XXOXOXOXOXOXOXXXXXX | 176 |
| 1791 | UUU | fUmC * fCmA * fG * mC * fU * mU * fU * mUmU | O | |
| WV- | UAGCUUCUUGUCCAGCUU | PO fU * fA * mGmC * fUmU * fCmU * fUmG * | XXOXOXOXOXOXOXXXXXX | 177 |
| 1792 | UUU | fUmC * fCmA * fG * mC * fU * mU * fU * mUmU | O | |
| WV- | UAGCUUCUUGUCCAGCUU | PO fU * mA * fGmC * fUmU * fCmU * fUmG * | XXOXOXOXOXOXOXXXXXX | 178 |
| 1793 | UUU | fUmC * fCmA * fG * mC * fU * mU * fU * mUmU | O | |
| WV- | UAGCUUCUUGUCCAGCUU | PO fU * fA * fG fC * mU fU * mC fU * mU fG * | XXOXOXOXOXOXOXXXXXX | 179 |
| 1794 | UUU | mU fC * mC fA * mG * fC * mU * fU * mU * | O | |
| | | mUmU | | |
| WV- | UAGCUUCUUGUCCAGCUU | PO fU * fA * mG fC * mU fU * mC fU * mU fG * | XXOXOXOXOXOXOXXXXXX | 180 |
| 1795 | UUU | mU fC * mC fA * mG * fC * mU * fU * mU * | O | |
| | | mUmU | | |
| WV- | UAGCUUCUUGUCCAGCUU | POmU * fA * fG fC * mU fU * mC fU * mU fG * | XXOXOXOXOXOXOXXXXXX | 181 |
| 1796 | UUU | mU fC * mC fA * mG * fC * mU * fU * mU * | O | |
| | | mUmU | | |
| WV- | UCACUGAGAAUACUGUCC | PO fU * fC * fA fC * mU fG * mA fG * mA fA * mU | XXOXOXOXOXOXOXXXXXX | 182 |
| 1797 | CUU | fA * mC fU * mG * fU * mC * fC * mC * mUmU | O | |
| WV- | UCACUGAGAAUACUGUCC | PO fU * fC * mA fC * mU fG * mA fG * mA fA * | XXOXOXOXOXOXOXXXXXX | 183 |
| 1798 | CUU | mU fA * mC fU * mG * fU * mC * fC * mC * | O | |
| | | mUmU | | |
| WV- | GUGCAUCCUUGGCGGUCU | POmG * fU * mG fC * mA fU * mC fC * mU fU * | XXOXOXOXOXOXOXXXXXX | 184 |
| 1800 | UUU | mG fG * mC fG * mG * fU * mC * fU * mU * | O | |
| | | mUmU | | |
| WV- | GUGCAUCCUUGGCGGUCU | PO fG * fU * fGmC * mAmU * mCmC * mU fU | XXOXOXOXOOOXOOXXXX | 185 |
| 1801 | UUU | fGmG * mC fGmG * fU * mC * fU * mU * mUmU | XO | |
| WV- | GUGCAUCCUUGGCGGUCU | PO fG * fU * fG fC * mA fU * mC fC * mU fU fG fG | XXOXOXOXOOOXOOXXXX | 186 |
| 1802 | UUU | * mC fGmG * fU * mC * fU * mU * mUmU | XO | |
| WV- | GUGCAUCCUUGGCGGUCU | POmG * fU * mG fC * mA fU * mC fC * mU fU fG | XXOXOXOXOOOXOOXXXX | 187 |
| 1803 | UUU | fG * mC fGmG * fU * mC * fU * mU * mUmU | XO | |
| WV- | CUGCUGGGCCACCUGGGA | POmC * fU * mG fC * mU fG * mG fG * mC fC * | XXOXOXOXOXOXOXXXXXX | 188 |
| 1804 | CUU | mA fC * mC fU * mG * fG * mG * fA * mC * | O | |
| | | mUmU | | |
| WV- | CUGCUGGGCCACCUGGGA | PO fC * fU * fGmC * mUmG * mGmG * mC fC | XXOXOXOXOOOXOOXXXX | 189 |
| 1805 | CUU | fAmC * mC fUmG * fG * mG * fA * mC * mUmU | XO | |
| WV- | CUGCUGGGCCACCUGGGA | PO fC * fU * fG fC * mU fG * mG fG * mC fC fA fC | XXOXOXOXOOOXOOXXXX | 190 |
| 1806 | CUU | * mC fUmG * fG * mG * fA * mC * mUmU | XO | |
| WV- | CUGCUGGGCCACCUGGGA | POmC * fU * mG fC * mU fG * mG fG * mC fC fA | XXOXOXOXOOOXOOXXXX | 191 |
| 1807 | CUU | fC * mC fUmG * fG * mG * fA * mC * mUmU | XO | |
| WV- | UUGGUCUGACCUCAGGGU | POmU * fU * mG fG * mU fC * mU fG * mA fC * | XXOXOXOXOXOXOXXXXXX | 192 |
| 1808 | CUU | mC fU * mC fA * mG * fG * mG * fU * mC * | O | |
| | | mUmU | | |
| WV- | UUGGUCUGACCUCAGGGU | PO fU * fU * fGmG * mUmC * mUmG * mA fC | XXOXOXOXOOOXOOXXXX | 193 |
| 1809 | CUU | fCmU * mC fAmG * fG * mG * fU * mC * mUmU | XO | |
| WV- | UUGGUCUGACCUCAGGGU | PO fU * fU * fG fG * mU fC * mU fG * mA fC fC fU | XXOXOXOXOOOXOOXXXX | 194 |
| 1810 | CUU | * mC fAmG * fG * mG * fU * mC * mUmU | XO | |
| WV- | UUGGUCUGACCUCAGGGU | POmU * fU * mG fG * mU fC * mU fG * mA fC fC | XXOXOXOXOOOXOOXXXX | 195 |
| 1811 | CUU | fU * mC fAmG * fG * mG * fU * mC * mUmU | XO | |
| WV- | AGGCCAGCAUGCCUGGAG | POmA * fG * mG fC * mC fA * mG fC * mA fU * | XXOXOXOXOXOXOXXXXXX | 196 |
| 1812 | GUU | mG fC * mC fU * mG * fG * mA * fG * mG * | O | |
| | | mUmU | | |
| WV- | AGGCCAGCAUGCCUGGAG | PO fA * fG * fGmC * mCmA * mGmC * mA fU | XXOXOXOXOOOXOOXXXX | 197 |
| 1813 | GUU | fGmC * mC fUmG * fG * mA * fG * mG * mUmU | XO | |
| WV- | AGGCCAGCAUGCCUGGAG | PO fA * fG * fG fC * mC fA * mG fC * mA fU fG fC | XXOXOXOXOOOXOOXXXX | 198 |
| 1814 | GUU | * mC fUmG * fG * mA * fG * mG * mUmU | XO | |
| WV- | AGGCCAGCAUGCCUGGAG | POmA * fG * mG fC * mC fA * mG fC * mA fU fG | XXOXOXOXOOOXOOXXXX | 199 |
| 1815 | GUU | fC * mC fUmG * fG * mA * fG * mG * mUmU | XO | |
| WV- | CCACCUGGGACUCCUGCA | POmC * fC * mA fC * mC fU * mG fG * mG fA * | XXOXOXOXOXOXOXXXXXX | 200 |
| 1816 | CUU | mC fU * mC fC * mU * fG * mC * fA * mC * | O | |
| | | mUmU | | |
| WV- | CCACCUGGGACUCCUGCA | PO fC * fC * fAmC * mCmU * mGmG * mG fA | XXOXOXOXOOOXOOXXXX | 201 |
| 1817 | CUU | fCmU * mC fCmU * fG * mC * fA * mC * mUmU | XO | |
| WV- | CCACCUGGGACUCCUGCA | PO fC * fC * fA fC * mC fU * mG fG * mG fA fC fU | XXOXOXOXOOOXOOXXXX | 202 |
| 1818 | CUU | * mC fCmU * fG * mC * fA * mC * mUmU | XO | |
| WV- | CCACCUGGGACUCCUGCA | POmC * fC * mA fC * mC fU * mG fG * mG fA fC | XXOXOXOXOOOXOOXXXX | 203 |
| 1819 | CUU | fU * mC fCmU * fG * mC * fA * mC * mUmU | XO | |
| WV- | GCCAUCGGUCACCCAGCCC | POmG * fC * mC fA * mU fC * mG fG * mU fC * | XXOXOXOXOXOXOXXXXXX | 204 |
| 1820 | UU | mA fC * mC fC * mA * fG * mC * fC * mC * | O | |
| | | mUmU | | |
| WV- | GCCAUCGGUCACCCAGCCC | PO fG * fC * fCmA * mUmC * mGmG * mU fC | XXOXOXOXOOOXOOXXXX | 205 |
| 1821 | UU | fAmC * mC fCmA * fG * mC * fC * mC * mUmU | XO | |
| WV- | GCCAUCGGUCACCCAGCCC | PO fG * fC * fC fA * mU fC * mG fG * mU fC fA fC | XXOXOXOXOOOXOOXXXX | 206 |
| 1822 | UU | * mC fCmA * fG * mC * fC * mC * mUmU | XO | |
| WV- | GCCAUCGGUCACCCAGCCC | POmG * fC * mC fA * mU fC * mG fG * mU fC fA | XXOXOXOXOOOXOOXXXX | 207 |
| 1823 | UU | fC * mC fCmA * fG * mC * fC * mC * mUmU | XO | |
| WV- | UCCAGCUUUAUUGGGAG | POmU * fC * mC fA * mG fC * mU fU * mU fA * | XXOXOXOXOXOXOXXXXXX | 208 |
| 1824 | GCUU | mU fU * mG fG * mG * fA * mG * fG * mC * | O | |
| | | mUmU | | |
| WV- | UCCAGCUUUAUUGGGAG | PO fU * fC * fCmA * mGmC * mUmU * mU fA | XXOXOXOXOOOXOOXXXX | 209 |
| 1825 | GCUU | fUmU * mG fGmG * fA * mG * fG * mC * mUmU | XO | |
| WV- | UCCAGCUUUAUUGGGAG | PO fU * fC * fC fA * mG fC * mU fU * mU fA fU fU | XXOXOXOXOOOXOOXXXX | 210 |
| 1826 | GCUU | * mG fGmG * fA * mG * fG * mC * mUmU | XO | |
| WV- | UCCAGCUUUAUUGGGAG | POmU * fC * mC fA * mG fC * mU fU * mU fA fU | XXOXOXOXOOOXOOXXXX | 211 |
| 1827 | GCUU | fU * mG fGmG * fA * mG * fG * mC * mUmU | XO | |
| WV- | AGGUCUCAGGCAGCCACG | POmA * fG * mG fU * mC fU * mC fA * mG fG * | XXOXOXOXOXOXOXXXXXX | 212 |
| 1828 | GUU | mC fA * mG fC * mC * fA * mC * fG * mG * | O | |
| | | mUmU | | |
| WV- | AGGUCUCAGGCAGCCACG | PO fA * fG * fGmU * mCmU * mCmA * mG fG | XXOXOXOXOOOXOOXXXX | 213 |
| 1829 | GUU | fCmA * mG fCmC * fA * mC * fG * mG * mUmU | XO | |
| WV- | AGGUCUCAGGCAGCCACG | PO fA * fG * fG fU * mC fU * mC fA * mG fG fC fA | XXOXOXOXOOOXOOXXXX | 214 |
| 1830 | GUU | * mG fCmC * fA * mC * fG * mG * mUmU | XO | |
| WV- | AGGUCUCAGGCAGCCACG | POmA * fG * mG fU * mC fU * mC fA * mG fG fC | XXOXOXOXOOOXOOXXXX | 215 |
| 1831 | GUU | fA * mG fCmC * fA * mC * fG * mG * mUmU | XO | |
| WV- | UGUCCAGCUUUAUUGGG | POmU * fG * mU fC * mC fA * mG fC * mU fU * | XXOXOXOXOXOXOXXXXXX | 216 |
| 2110 | AGUU | mU fA * mU fU * mG * fG * mG * fA * mG * | O | |
| | | mUmU | | |
| WV- | UGUCCAGCUUUAUUGGG | POmU * fG * mU fC * mC fA * mG fC * mU fU * | XXOXOXOXOXO | 217 |
| 2111 | AGGCCAUU | mU fA * mU fU * G * G * G * A * G * G * C * C * | XOXXXXXXXXXXO | |
| | | A * mUmU | | |
| WV- | UAGCUUCUUGUCCAGCTT | POmU * fA * mG fC * mU fU * mC fU * mU fG * | XXOXOXOXOXO | 218 |
| 2114 | TATTGUU | mU fC * mC fA * G * C * T * T * T * A * T * T * G | XOXXXXXXXXXXO | |
| | | * mUmU | | |
| WV- | UAGCUUCUUGUCCAGCUU | POmU * fA * mG fC * mU fU * mC fU * mU fG * | XXOXOXOXOXOXOXXXXXX | 219 |
| 2150 | UTU | mU fC * mC fA * mG * fC * mU * fU * mU * T * | X | |
| | | mU | | |
| WV- | UAGCUUCUUGUCCAGCUU | POmU * fA * mG fC * mU fU * mC fU * mU fG * | XXOXOXOXOXOXOXXXXXX | 220 |
| 2151 | TUU | mU fC * mC fA * mG * fC * mU * fU * T * mUmU | O | |
| WV- | UAGCUUCUUGUCC | POmU * fA * mG fC * mU fU * mC fU * mU fG * | XXOXOXOXOXO | 221 |
| 2152 | AGCTTTATTGTU | mU fC * mC fA * G * C * T * T * T * A * T * T * G | XOXXXXXXXXXXX | |
| | | * T * mU | | |
| WV- | UAGCUUCUUGUCC | POmU * fA * mG fC * mU fU * mC fU * mU fG * | XXOXOXOXOXO | 222 |
| 2153 | AGCTTTATTTUU | mU fC * mCfA * G * C * T * T * T * A * T * T * T * | XOXXXXXXXXXXO | |
| | | mUmU | | |
| WV- | UGUCCAGCUUUAUUGGG | POmU * fG * mU fC * mC fA * mG fC * mU fU * | XXOXOXOXOXOXOXXXXXX | 223 |
| 2154 | AGTU | mU fA * mU fU * mG * fG * mG * fA * mG * T * | X | |
| | | mU | | |
| WV- | UGUCCAGCUUUAU | POmU * fG * mU fC * mC fA * mG fC * mU fU * | XXOXOXOXOXOXOXXXXXX | 224 |
| 2155 | UGGGATUU | mU fA * mU fU * mG * fG * mG * fA * T * mUmU | O | |
| WV- | UGUCCAGCUUUAU | POmU * fG * mU fC * mC fA * mG fC * mU fU * | XXOXOXOXOXO | 225 |
| 2156 | UGGGAGGCCATU | mU fA * mU fU * G * G * G * A * G * G * C * C * | XOXXXXXXXXXXX | |
| | | A * T * mU | | |
| WV- | UGUCCAGCUUUAU | POmU * fG * mU fC * mC fA * mG fC * mU fU * | XXOXOXOXOXO | 226 |
| 2157 | UGGGAGGCCTUU | mU fA * mU fU * G * G * G * A * G * G * C * C * T | XOXXXXXXXXXXO | |
| | | * mUmU | | |
| WV- | CAUAGCAGCUUCUUGUCC | POmC * fA * mU fA * mG fC * mA fG * mC fU * | XXOXOXOXOXOXOXXXXXX | 227 |
| 2166 | AUU | mU fC * mU fU * mG * fU * mC * fC * mA * | O | |
| | | mUmU | | |
| WV- | AUAGCAGCUUCUUGUCCA | POmA * fU * mA fG * mC fA * mG fC * mU fU * | XXOXOXOXOXOXOXXXXXX | 228 |
| 2167 | GUU | mC fU * mU fG * mU * fC * mC * fA * mG * | O | |
| | | mUmU | | |
| WV- | UAGCAGCUUCUUGUCCAG | POmU * fA * mG fC * mA fG * mC fU * mU fC * | XXOXOXOXOXOXOXXXXXX | 229 |
| 2168 | CUU | mU fU * mG fU * mC * fC * mA * fG * mC * | O | |
| | | mUmU | | |
| WV- | AGCAGCUUCUUGUCCAGC | POmA * fG * mC fA * mG fC * mU fU * mC fU * | XXOXOXOXOXOXOXXXXXX | 230 |
| 2169 | UUU | mU fG * mU fC * mC * fA * mG * fC * mU * | O | |
| | | mUmU | | |
| WV- | GCAGCUUCUUGUCCAGCU | POmG * fC * mA fG * mC fU * mU fC * mU fU * | XXOXOXOXOXOXOXXXXXX | 231 |
| 2170 | UUU | mG fU * mC fC * mA * fG * mC * fU * mU * | O | |
| | | mUmU | | |
| WV- | CAGCUUCUUGUCCAGCUU | POmC * fA * mG fC * mU fU * mC fU * mU fG * | XXOXOXOXOXOXOXXXXXX | 232 |
| 2171 | UUU | mU fC * mC fA * mG * fC * mU * fU * mU * | O | |
| | | mUmU | | |
| WV- | AGCUUCUUGUCCAGCUUU | POmA * fG * mC fU * mU fC * mU fU * mG fU * | XXOXOXOXOXOXOXXXXXX | 233 |
| 2172 | AUU | mC fC * mA fG * mC * fU * mU * fU * mA * | O | |
| | | mUmU | | |
| WV- | GCUUCUUGUCCAGCUUUA | POmG * fC * mU fU * mC fU * mU fG * mU fC * | XXOXOXOXOXOXOXXXXXX | 234 |
| 2173 | UUU | mC fA * mG fC * mU * fU * mU * fA * mU * | O | |
| | | mUmU | | |
| WV- | CUUCUUGUCCAGCUUUAU | POmC * fU * mU fC * mU fU * mG fU * mC fC * | XXOXOXOXOXOXOXXXXXX | 235 |
| 2174 | UUU | mA fG * mCfU * mU * fU * mA * fU * mU * | O | |
| | | mUmU | | |
| WV- | UUCUUGUCCAGCUUUAU | POmU * fU * mC fU * mU fG * mU fC * mC fA * | XXOXOXOXOXOXOXXXXXX | 236 |
| 2175 | UGUU | mG fC * mU fU * mU * fA * mU * fU * mG * | O | |
| | | mUmU | | |
| WV- | UCUUGUCCAGCUUUAUU | POmU * fC * mU fU * mG fU * mC fC * mA fG * | XXOXOXOXOXOXOXXXXXX | 237 |
| 2176 | GGUU | mC fU * mU fU * mA * fU * mU * fG * mG * | O | |
| | | mUmU | | |
| WV- | CUUGUCCAGCUUUAUUG | POmC * fU * mU fG * mU fC * mC fA * mG fC * | XXOXOXOXOXOXOXXXXXX | 238 |
| 2177 | GGUU | mU fU * mU fA * mU * fU * mG * fG * mG * | O | |
| | | mUmU | | |
| WV- | UUGUCCAGCUUUAUUGG | POmU * fU * mG fU * mC fC * mA fG * mC fU * | XXOXOXOXOXOXOXXXXXX | 239 |
| 2178 | GAUU | mU fU * mA fU * mU * fG * mG * fG * mA * | O | |
| | | mUmU | | |
| WV- | CAAUAAAGCUGG | rC rA rA rU rA rA rA rG rC rU rG rG rA rC rA rA rG | OOOOOOOOOO | 240 |
| 2372 | ACAAGAAGCUA | rA rA rG rC rU rA | OOOOOOOOOOOO | |
| WV- | UGGCCUCCCAAUAAAGCU | rU rG rG rC rC rU rC rC rC rA rA rU rA rA rA rG rC | OOOOOOOOOO | 241 |
| 2373 | GGACA | rU rG rG rA rC rA | OOOOOOOOOOOO | |
| WV- | UAGCUUCUUGUC | mU * fA * mG fC * mU fU * mC fU * mU fG * mU | XXOXOXOXOXOXOXXXXXX | 242 |
| 2386 | CAGCUUUUU | fC * mC fA * mG * fC * mU * fU * mU * mUmU | O | |
| WV- | UAGCUUCUUGUC | mU * fA * mG fC * mU fU * mC fU * mU fG * mU | XXOXOXOXOXO | 243 |
| 2387 | CAGCTTTATTGUU | fC * mC fA * G * C * T * T * T * A * T * T * G * | XOXXXXXXXXXXO | |
| | | mUmU | | |
| WV- | UGUCCAGCUUUA | mU * fG * mU fC * mC fA * mG fC * mU fU * mU | XXOXOXOXOXOXOXXXXXX | 244 |
| 2388 | UUGGGAGUU | fA * mU fU * mG * fG * mG * fA * mG * mUmU | O | |
| WV- | UGUCCAGCUUUA | mU * fG * mU fC * mC fA * mG fC * mU fU * mU | XXOXOXOXOXO | 245 |
| 2389 | UUGGGAGGCCAUU | fA * mU fU * G * G * G * A * G * G * C * C * A * | XOXXXXXXXXXXO | |
| | | mUmU | | |
| WV- | TAGCUUCUUGUCCAGCUU | POT * fA * mG fC * mU fU * mC fU * mU fG * mU | XXOXOXOXOXOXOXXXXXX | 246 |
| 2420 | UUU | fC * mC fA * mG * fC * mU * fU * mU * mUmU | O | |
| WV- | TAGCUUCUUGUCCAGCUU | T * fA * mG fC * mU fU * mC fU * mU fG * mU fC | XXOXOXOXOXOXOXXXXXX | 247 |
| 2421 | UUU | * mC fA * mG * fC * mU * fU * mU * mUmU | O | |
| WV- | AGCUUCUUGUCCAGCUUU | fA * mG fC * mU fU * mC fU * mU fG * mU fC * | XOXOXOXOXOXOXXXXXXO | 248 |
| 2423 | UU | mC fA * mG * fC * mU * fU * mU * mUmU | | |
| WV- | TAGCUUCUUGUC | POT * fA * mG fC * mU fU * mC fU * mU fG * mU | XXOXOXOXOXO | 249 |
| 2424 | CAGCTTTATTGUU | fC * mC fA * G * C * T * T * T * A * T * T * G * | XOXXXXXXXXXXO | |
| | | mUmU | | |
| WV- | TAGCUUCUUGUC | T * fA * mG fC * mU fU * mC fU * mU fG * mU fC | XXOXOXOXOXO | 250 |
| 2425 | CAGCTTTATTGUU | * mC fA * G * C * T * T * T * A * T * T * G * | XOXXXXXXXXXXO | |
| | | mUmU | | |
| WV- | AGCUUCUUGUCCAGCTTT | fA * mG fC * mU fU * mC fU * mU fG * mU fC * | XOXOXOXOXO | 251 |
| 2427 | ATTGUU | mC fA * G * C * T * T * T * A * T * T * G * mUmU | XOXXXXXXXXXXO | |
| WV- | UGGUAATCCACTTTCAGAG | mU * mGmGmUmA * A * T * m5C * m5C * A * | XOOOXXXXXXXXXXXOOOX | 252 |
| 2429 | G | m5C * T * T * T * m5C * mAmGmAmG * mG | | |
| WV- | UAGCUUCUUGUCCAGCUU | POmU * fA * mG fC * mU fU * mC fU * mU fG * | XXOXOXOXOXOXOXXXXO | 253 |
| 2478 | U | mU fC * mC fA * mG * fC * mU * mUmU | | |
| WV- | UAGCUUCUUGUCCAGUU | POmU * fA * mG fC * mU fU * mC fU * mU fG * | XXOXOXOXOXOXOXXO | 254 |
| 2479 | | mU fC * mC fA * mG * mUmU | | |
| WV- | TAGCTUCUTGTCCAGCTUT | POT * fAG * fCT * fUC * fUT * fGT * fCC * fAG * | XOXOXOXOXOXOXOXOXX | 255 |
| 2480 | UU | fCT * fU * T * mUmU | XO | |
| WV- | TAGCTUCTTGTCCAGCTUT | POT * fAG * fCT * fUC * T * T * fGT * fCC * fAG * | XOXOXOXXXOXOXOXOXXX | 256 |
| 2481 | UU | fCT * fU * T * mUmU | O | |
| WV- | TAGCTUCUTGUCCAGCTUT | POT * fAG * fCT * fUC * fUT * fG fU fCC * fAG * | XOXOXOXOXOOOXOXOXX | 257 |
| 2482 | UU | fCT * fU * T * mUmU | XO | |
| WV- | TAGCTUCTTGUCCAGCTUT | POT * fAG * fCT * fUC * T * T * fG fU fCC * fAG * | XOXOXOXXXOOOXOXOXX | 258 |
| 2483 | UU | fCT * fU * T * mUmU | XO | |
| WV- | UAGCUUCUUGUCCAGCUU | mU * fA * mG fC * mU fU * mC fU * mU fG * mU | XXOXOXOXOXOXOXXXXO | 259 |
| 2484 | U | fC * mC fA * mG * fC * mU * mUmU | | |
| WV- | UAGCUUCUUGUCCAGUU | mU * fA * mG fC * mU fU * mC fU * mU fG * mU | XXOXOXOXOXOXOXXO | 260 |
| 2485 | | fC * mC fA * mG * mUmU | | |
| WV- | TAGCTUCUTGTCCAGCTUT | T * fAG * fCT * fUC * fUT * fGT * fCC * fAG * fCT | XOXOXOXOXOXOXOXOXX | 261 |
| 2486 | UU | * fU * T * mUmU | XO | |
| WV- | TAGCTUCTTGTCCAGCTUT | T * fAG * fCT * fUC * T * T * fGT * fCC * fAG * fCT | XOXOXOXXXOXOXOXOXXX | 262 |
| 2487 | UU | * fU * T * mUmU | O | |
| WV- | TAGCTUCUTGUCCAGCTUT | T * fAG * fCT * fUC * fUT * fG fU fCC * fAG * fCT | XOXOXOXOXOOOXOXOXX | 263 |
| 2488 | UU | * fU * T * mUmU | XO | |
| WV- | TAGCTUCTTGUCCAGCTUT | T * fAG * fCT * fUC * T * T * fG fU fCC * fAG * fCT | XOXOXOXXXOOOXOXOXX | 264 |
| 2489 | UU | * fU * T * mUmU | XO | |
| WV- | TAGCTUCUTGTCCAGCTTT | POT * fAG * fCT * fUC * fUT * fGT * fCC * fA * G | XOXOXOXOXO | 265 |
| 2490 | ATTGUU | * C * T * T * T * A * T * T * G * mUmU | XOXXXXXXXXXXXO | |
| WV- | TAGCTUCTTGTCCAGCTTTA | POT * fAG * fCT * fUC * T * T * fGT * fCC * fA * G | XOXOXOXXXO | 266 |
| 2491 | TTGUU | * C * T * T * T * A * T * T * G * mUmU | XOXXXXXXXXXXXO | |
| WV- | TAGCUUCUUGUCCAGCTTT | POT * fA * mG fC * mU fU * mC fU * mU fG * mU | XXOXOXOXOXOXOXXXXXX | 267 |
| 2492 | ATUU | fC * mC fA * G * C * T * T * T * A * T * mUmU | XXO | |
| WV- | TAGCUUCUUGUCCAGCTTT | POT * fA * mG fC * mU fU * mC fU * mU fG * mU | XXOXOXOXOXOXOXXXXXX | 268 |
| 2493 | UU | fC * mC fA * G * C * T * T * T * mUmU | O | |
| WV- | TAGCTUCUTGUCCAGCTTT | POT * fAG * fCT * fUC * fUT * fG fU fCC * fA * G | XOXOXOXOXOOOXXXXXXX | 269 |
| 2494 | ATTGUU | * C * T * T * T * A * T * T * G * mUmU | XXXXO | |
| WV- | TAGCTUCTTGUCCAGCTTT | POT * fAG * fCT * fUC * T * T * fG fU fCC * fA * G | XOXOXOXXXOOOXXXXXXX | 270 |
| 2495 | ATTGUU | * C * T * T * T * A * T * T * G * mUmU | XXXXO | |
| WV- | TAGCTUCUTGTCCAGCTTT | T * fAG * fCT * fUC * fUT * fGT * fCC * fA * G * C | XOXOXOXOXOXOXXXXXXX | 271 |
| 2496 | ATTGUU | * T * T * T * A * T * T * G * mUmU | XXXXO | |
| WV- | TAGCTUCTTGTCCAGCTTTA | T * fAG * fCT * fUC * T * T * fGT * fCC * fA * G * | XOXOXOXXXOXOXXXXXXX | 272 |
| 2497 | TTGUU | C * T * T * T * A * T * T * G * mUmU | XXXXO | |
| WV- | TAGCUUCUUGUCCAGCTTT | T * fA * mG fC * mU fU * mC fU * mU fG * mU fC | XXOXOXOXOXOXOXXXXXX | 273 |
| 2498 | ATUU | * mC fA * G * C * T * T * T * A * T * mUmU | XXO | |
| WV- | TAGCUUCUUGUCCAGCTTT | T * fA * mG fC * mU fU * mC fU * mU fG * mU fC | XXOXOXOXOXOXOXXXXXX | 274 |
| 2499 | UU | * mC fA * G * C * T * T * T * mUmU | O | |
| WV- | TAGCTUCUTGU | T * fAG * fCT * fUC * fUT * fG fU fCC * fA * G * C | XOXOXOXOXOOOXXXXXXX | 275 |
| 2500 | CCAGCTTTATTGUU | * T * T * T * A * T * T * G * mUmU | XXXXO | |
| WV- | TAGCTUCTTGU | T * fAG * fCT * fUC * T * T * fG fU fCC * fA * G * | XOXOXOXXXOOOXXXXXXX | 276 |
| 2501 | CCAGCTTTATTGUU | C * T * T * T * A * T * T * G * mUmU | XXXXO | |
| WV- | TCCUCAGUCUGCUUCGCA | POT * fC * mC fU * mC fA * mG fU * mC fU * mG | XXOXOXOXOXOXOXXXXXX | 277 |
| 2502 | CUU | fC * mU fU * mC * fG * mC * fA * mC * mUmU | O | |
| WV- | TCCUCAGUCUGCTUCGCAC | POT * fCC * fUC * fAG * fUC * fUG * fCT * fUC * | XOXOXOXOXOXOXOXOXO | 278 |
| 2503 | UU | fGC * fAC * mUmU | XO | |
| WV- | TCCUCAGTCUGCTUCGCAC | POT * fCC * fUC * fAG * T * C * fUG * fCT * fUC * | XOXOXOXXXOXOXOXOXO | 279 |
| 2504 | UU | fGC * fAC * mUmU | XO | |
| WV- | TCCUCAGUCUGCTUCGCAC | POT * fCC * fUC * fAG * fUC * fU fG fCT * fUC * | XOXOXOXOXOOOXOXOXO | 280 |
| 2505 | UU | fGC * fAC * mUmU | XO | |
| WV- | TCCUCAGTCUGCTUCGCAC | POT * fCC * fUC * fAG * T * C * fU fG fCT * fUC * | XOXOXOXXXOOOXOXOXO | 281 |
| 2506 | UU | fGC * fAC * mUmU | XO | |
| WV- | TCCUCAGUCUGCUUCGCA | T * fC * mC fU * mC fA * mG fU * mC fU * mG fC | XXOXOXOXOXOXOXXXXXX | 282 |
| 2507 | CUU | * mU fU * mC * fG * mC * fA * mC * mUmU | O | |
| WV- | TCCUCAGUCUGCTUCGCAC | T * fCC * fUC * fAG * fUC * fUG * fCT * fUC * fGC | XOXOXOXOXOXOXOXOXO | 283 |
| 2508 | UU | * fAC * mUmU | XO | |
| WV- | TCCUCAGTCUGCTUCGCAC | T * fCC * fUC * fAG * T * C * fUG * fCT * fUC * | XOXOXOXXXOXOXOXOXO | 284 |
| 2509 | UU | fGC * fAC * mUmU | XO | |
| WV- | TCCUCAGUCUGCTUCGCAC | T * fCC * fUC * fAG * fUC * fU fG fCT * fUC * fGC | XOXOXOXOXOOOXOXOXO | 285 |
| 2510 | UU | * fAC * mUmU | XO | |
| WV- | TCCUCAGTCUGCTUCGCAC | T * fCC * fUC * fAG * T * C * fU fG fCT * fUC * | XOXOXOXXXOOOXOXOXO | 286 |
| 2511 | UU | fGC * fAC * mUmU | XO | |
| WV- | TCCUCAGUCUGC | POT * fC * mC fU * mC fA * mG fU * mC fU * mG | XXOXOXOXOXOXOXXXXXX | 287 |
| 2512 | UUCGCACCTTCUU | fC * mU fU * C * G * C * A * C * C * T * T * C * | XXXXO | |
| | | mUmU | | |
| WV- | TCCUCAGUCUGC | POT * fCC * fUC * fAG * fUC * fUG * fCT * fU * C | XOXOXOXOXOXOXXXXXXX | 288 |
| 2513 | TUCGCACCTTCUU | * G * C * A * C * C * T * T * C * mUmU | XXXXO | |
| WV- | TCCUCAGTCUGC | POT * fCC * fUC * fAG * T * C * fUG * fCT * fU * | XOXOXOXXXOXOXXXXXXX | 289 |
| 2514 | TUCGCACCTTCUU | C * G * C * A * C * C * T * T * C * mUmU | XXXXO | |
| WV- | TCCUCAGUCUGC | POT * fC * mC fU * mC fA * mG fU * mC fU * mG | XXOXOXOXOXOXOXXXXXX | 290 |
| 2515 | UUCGCACCTUU | fC * mU fU * C * G * C * A * C * C * T * mUmU | XXO | |
| WV- | TCCUCAGUCUGCUUCGCA | POT * fC * mC fU * mC fA * mG fU * mC fU * mG | XXOXOXOXOXOXOXXXXXX | 291 |
| 2516 | CUU | fC * mU fU * C * G * C * A * C * mUmU | O | |
| WV- | TCCUCAGUCUGC | POT * fCC * fUC * fAG * fUC * fU fG fCT * fU * C | XOXOXOXOXOOOXXXXXXX | 292 |
| 2517 | TUCGCACCTTCUU | * G * C * A * C * C * T * T * C * mUmU | XXXXO | |
| WV- | TCCUCAGTCUGC | POT * fCC * fUC * fAG * T * C * fU fG fCT * fU * C | XOXOXOXXXOOOXXXXXXX | 293 |
| 2518 | TUCGCACCTTCUU | * G * C * A * C * C * T * T * C * mUmU | XXXXO | |
| WV- | TCCUCAGUCUGC | T * fC * mC fU * mC fA * mG fU * mC fU * mG fC | XXOXOXOXOXOXOXXXXXX | 294 |
| 2519 | UUCGCACCTTCUU | * mU fU * C * G * C * A * C * C * T * T * C * | XXXXO | |
| | | mUmU | | |
| WV- | TCCUCAGUCUGC | T * fCC * fUC * fAG * fUC * fUG * fCT * fU * C * G | XOXOXOXOXOXOXXXXXXX | 295 |
| 2520 | TUCGCACCTTCUU | * C * A * C * C * T * T * C * mUmU | XXXXO | |
| WV- | TCCUCAGTCUGC | T * fCC * fUC * fAG * T * C * fUG * fCT * fU * C * | XOXOXOXXXOXOXXXXXXX | 296 |
| 2521 | TUCGCACCTTCUU | G * C * A * C * C * T * T * C * mUmU | XXXXO | |
| WV- | TCCUCAGUCUGCUUCGCA | T * fC * mC fU * mC fA * mG fU * mC fU * mG fC | XXOXOXOXOXOXOXXXXXX | 297 |
| 2522 | CCTUU | * mU fU * C * G * C * A * C * C * T * mUmU | XXO | |
| WV- | TCCUCAGUCUGCUUCGCA | T * fC * mC fU * mC fA * mG fU * mC fU * mG fC | XXOXOXOXOXOXOXXXXXX | 298 |
| 2523 | CUU | * mU fU * C * G * C * A * C * mUmU | O | |
| WV- | TCCUCAGUCUGC | T * fCC * fUC * fAG * fUC * fU fG fCT * fU * C * G | XOXOXOXOXOOOXXXXXXX | 299 |
| 2524 | TUCGCACCTTCUU | * C * A * C * C * T * T * C * mUmU | XXXXO | |
| WV- | TCCUCAGTCUGC | T * fCC * fUC * fAG * T * C * fU fG fCT * fU * C * | XOXOXOXXXOOOXXXXXXX | 300 |
| 2525 | TUCGCACCTTCUU | G * C * A * C * C * T * T * C * mUmU | XXXXO | |
| WV- | TUGCUUCUUGUCCAGCUU | T * fU * mG fC * mU fU * mC fU * mU fG * mU fC | XXOXOXOXOXOXOXXXXXX | 301 |
| 2547 | UUU | * mC fA * mG * fC * mU * fU * mU * mUmU | O | |
| WV- | TUGCUUCUUGUCCAGCUU | POT * fU * mG fC * mU fU * mC fU * mU fG * mU | XXOXOXOXOXOXOXXXXXX | 302 |
| 2548 | UUU | fC * mC fA * mG * fC * mU * fU * mU * mUmU | O | |
| WV- | AGCUUCTTGTCCAGCUUU | mA * SmGmCmUmU * SC * ST * ST * SG * ST * | SOOOSSSSSSSRSSSOOOS | 303 |
| 2555 | AU | SC * SC * RA * SG * SC * SmUmUmUmA * SmU | | |
| WV- | AGCUUCTTGTCCAGCUUU | mA * SmGmCmUmU * SC * ST * ST * SG * ST * | SOOOSSSSSSRSSSSOOOS | 304 |
| 2556 | AU | SC * RC * SA * SG * SC * SmUmUmUmA * SmU | | |
| WV- | AGCUUCTTGTCCAGCUUU | mA * SmGmCmUmU * SC * ST * ST * SG * RT * | SOOOSSSSRSSSSSSOOOS | 305 |
| 2557 | AU | SC * SC * SA * SG * SC * SmUmUmUmA * SmU | | |
| WV- | AGCUUCTTGTCCAGCUUU | mA * SmGmCmUmU * SC * ST * ST * SG * RT * | SOOOSSSSRSSRSSSOOOS | 306 |
| 2558 | AU | SC * SC * RA * SG * SC * SmUmUmUmA * SmU | | |
| WV- | TUCCAGCUUUAUUAGGGA | POT * fU * mC fC * mA fG * mc fU * mU fU * mA | XXOXOXOXOXOXOXXXXXX | 307 |
| 2621 | CUU | fU * mU fA * mG * fG * mG * fA * mC * mUmU | O | |
| WV- | TUCCAGCUTUAUTAGGGA | POT * fU * C fC * A fG * C fU * T fU * A fU * T fA | XXOXOXOXOXOXOXXXXXX | 308 |
| 2622 | CUU | * G * fG * G * fA * C * mUmU | O | |
| WV- | TGTCCAGCTTTATTGGGAG | TGTCCAGCTTTATTGGGAGG | OOOOOOOOOOOOOOOOO | 309 |
| 2644 | G | | OOO | |
| WV- | UGUCCAGCTTTATTGGGAG | mU * RmGmUmCmC * SA * SG * SC * ST * ST * | ROOOSSSSSSSRSSSOOOR | 310 |
| 2645 | G | ST * SA * RT * ST * SG * SmGmGmAmG * RmG | | |
| WV- | UGUCCAGCTTTATTGGGAG | mU * RmG * RmU * RmC * RmC * SA * SG * SC * | RRRRSSSSSSSRSSSRRRR | 311 |
| 2646 | G | ST * ST * ST * SA * RT * ST * SG * SmG * RmG * | | |
| | | RmA * RmG * RmG | | |
| WV- | UGUCCAGCTTTATTGGGAG | mU * SmG * SmU * SmC * SmC * SA * SG * SC * SSSSSSSSSSSRSSSSSSS | 312 | |
| 2647 | G | ST * ST * ST * SA * RT * ST * SG * SmG * SmG * | | |
| | | SmA * SmG * SmG | | |
| WV- | UGUCCAGCTTTATTGGGAG | fU * S fG fU fC fC * SA * SG * SC * ST * ST * ST * | SOOOSSSSSSSRSSSOOOS | 313 |
| 2648 | G | SA * RT * ST * SG * S fG fG fA fG * S fG | | |
| WV- | UGUCCAGCTTTATTGGGAG | fU * R fG fU fC fC * SA * SG * SC * ST * ST * ST * | ROOOSSSSSSSRSSSOOOR | 314 |
| 2649 | G | SA * RT * ST * SG * S fG fG fA fG * R fG | | |
| WV- | UGUCCAGCTTTATTGGGAG | fU * R fG * R fU * R fC * R fC * SA * SG * SC * ST | RRRRSSSSSSSRSSSRRRR | 315 |
| 2650 | G | * ST * ST * SA * RT * ST * SG * S fG * R fG * R fA | | |
| | | * R fG * R fG | | |
| WV- | UGUCCAGCTTTATTGGGAG | fU * S fG * S fU * S fC * S fC * SA * SG * SC * ST * | SSSSSSSSSSSRSSSSSSS | 316 |
| 2651 | G | ST * ST * SA * RT * ST * SG * S fG * S fG * S fA * S | | |
| | | fG * S fG | | |
| WV- | TAGCUUCUUGUCCAGCUU | PHT * fA * mG fC * mU fU * mC fU * mU fG * mU | XXOXOXOXOXOXOXXXXXX | 317 |
| 2652 | UUU | fC * mC fA * mG * fC * mU * fU * mU * mUmU | O | |
| WV- | TAGCUUCUUGUCCAGCUU | PST * fA * mG fC * mU fU * mC fU * mU fG * mU | XXOXOXOXOXOXOXXXXXX | 318 |
| 2653 | UUU | fC * mC fA * mG * fC * mU * fU * mU * mUmU | O | |
| WV- | TAGCUUCUUGUCCAGCUU | Mod022T * fA * mG fC * mU fU * mC fU * mU fG | OXXOXOXOXOXOXOXXXXX | 319 |
| 2654 | UUU | * mU fC * mC fA * mG * fC * mU * fU * mU * | XO | |
| | | mUmU | | |
| WV- | TAGCUUCUUGUCCAGCUU | Mod022 * T * fA * mG fC * mU fU * mC fU * mU | XXXOXOXOXOXOXOXXXXX | 320 |
| 2655 | UUU | fG * mU fC * mC fA * mG * fC * mU * fU * mU * | XO | |
| | | mUmU | | |
| WV- | AGCUUCUUGUCCAGCUUU | PHMod023 * fA * mG fC * mU fU * mC fU * mU | XXOXOXOXOXOXOXXXXXX | 321 |
| 2656 | UU | fG * mU fC * mC fA * mG * fC * mU * fU * mU * | O | |
| | | mUmU | | |
| WV- | AGCUUCUUGUCCAGCUUU | POMod023 * fA * mG fC * mU fU * mC fU * mU | XXOXOXOXOXOXOXXXXXX | 322 |
| 2657 | UU | fG * mU fC * mC fA * mG * fC * mU * fU * mU * | O | |
| | | mUmU | | |
| WV- | AGCUUCUUGUCCAGCUUU | PSMod023 * fA * mG fC * mU fU * mC fU * mU | XXOXOXOXOXOXOXXXXXX | 323 |
| 2658 | UU | fG * mU fC * mC fA * mG * fC * mU * fU * mU * | O | |
| | | mUmU | | |
| WV- | UGUCCAGCTTTATTGGGAG | L001mU * SmGmUmCmC * SA * SG * SC * ST * | OSOOOSSSSSSRSSSSOOOS | 324 |
| 2679 | G | ST * ST * RA * ST * ST * SG * SmGmGmAmG * | | |
| | | SmG | | |
| WV- | UGUCCAGCTTTATTGGGAG | L001mU * SmGmUmCmC * SA * SG * SC * ST * | OSOOOSSSSSSSSSSRSSOS | 325 |
| 2680 | G | ST * ST * SA * ST * ST * SG * RG * SG * SmAmG * | | |
| | | SmG | | |
| WV- | UGUCCAGCTTTATTGGGAG | L001mU * SmGmUmCmCmA * SG * SC * ST * ST | OSOOOOSSSSSSSSSRSSSS | 326 |
| 2681 | G | * ST * SA * ST * ST * SG * RG * SG * SA * SmG * | | |
| | | SmG | | |
| WV- | TAUAGCAGCUUCUUGUCC | POT * fA * mU fA * mG fC * mA fG * mC fU * mU | XXOXOXOXOXOXOXXXXXX | 327 |
| 2693 | AUU | fC * mU fU * mG * fU * mC * fC * mA * mUmU | O | |
| WV- | TUAGCAGCUUCUUGUCCA | POT * fU * mA fG * mC fA * mG fC * mU fU * mC | XXOXOXOXOXOXOXXXXXX | 328 |
| 2694 | GUU | fU * mU fG * mU * fC * mC * fA * mG * mUmU | O | |
| WV- | AAGCAGCUUCUUGUCCAG | POA * fA * mG fC * mA fG * mC fU * mU fC * mU | XXOXOXOXOXOXOXXXXXX | 329 |
| 2695 | CUU | fU * mG fU * mC * fC * mA * fG * mC * mUmU | O | |
| WV- | TGCAGCUUCUUGUCCAGC | POT * fG * mC fA * mG fC * mU fU * mC fU * mU | XXOXOXOXOXOXOXXXXXX | 330 |
| 2696 | UUU | fG * mU fC * mC * fA * mG * fC * mU * mUmU | O | |
| WV- | TCAGCUUCUUGUCCAGCU | POT * fC * mA fG * mC fU * mU fC * mU fU * mG | XXOXOXOXOXOXOXXXXXX | 331 |
| 2697 | UUU | fU * mC fC * mA * fG * mC * fU * mU * mUmU | O | |
| WV- | TGCUUCUUGUCCAGCUUU | POT * fG * mC fU * mU fC * mU fU * mG fU * mC | XXOXOXOXOXOXOXXXXXX | 332 |
| 2698 | AUU | fC * mA fG * mC * fU * mU * fU * mA * mUmU | O | |
| WV- | TCUUCUUGUCCAGCUUUA | POT * fC * mU fU * mC fU * mU fG * mU fC * mC | XXOXOXOXOXOXOXXXXXX | 333 |
| 2699 | UUU | fA * mG fC * mU * fU * mU * fA * mU * mUmU | O | |
| WV- | TUUCUUGUCCAGCUUUAU | POT * fU * mU fC * mU fU * mG fU * mC fC * mA | XXOXOXOXOXOXOXXXXXX | 334 |
| 2700 | UUU | fG * mC fU * mU * fU * mA * fU * mU * mUmU | O | |
| WV- | AUCUUGUCCAGCUUUAUU | POA * fU * mC fU * mU fG * mU fC * mC fA * mG | XXOXOXOXOXOXOXXXXXX | 335 |
| 2701 | GUU | fC * mU fU * mU * fA * mU * fU * mG * mUmU | O | |
| WV- | ACUUGUCCAGCUUUAUUG | POA * fC * mU fU * mG fU * mC fC * mA fG * mC | XXOXOXOXOXOXOXXXXXX | 336 |
| 2702 | GUU | fU * mU fU * mA * fU * mU * fG * mG * mUmU | O | |
| WV- | TUUGUCCAGCUUUAUUGG | POT * fU * mU fG * mU fC * mC fA * mG fC * mU | XXOXOXOXOXOXOXXXXXX | 337 |
| 2703 | GUU | fU * mU fA * mU * fU * mG * fG * mG * mUmU | O | |
| WV- | AUGUCCAGCUUUAUUGG | POA * fU * mG fU * mC fC * mA fG * mC fU * mU | XXOXOXOXOXOXOXXXXXX | 338 |
| 2704 | GAUU | fU * mA fU * mU * fG * mG * fG * mA * mUmU | O | |
| WV- | UGUCCAGCTTTATTGGGAG | L001mU * mGmUmCmC * A * G * C * T * T * T * | OXOOOXXXXXXXXXXXOOO | 339 |
| 2705 | G | A * T * T * G * mGmGmAmG * mG | X | |
| WV- | UGUCCAGCTTTATTGGGAG | L001mU * mGmUmCmC * A * G * C * T * T * T * | OXOOOXXXXXXXXXXXXXO | 340 |
| 2706 | G | A * T * T * G * G * G * mAmG * mG | X | |
| WV- | UGUCCAGCTTTATTGGGAG | L001mU * mGmUmCmCmA * G * C * T * T * T * | OXOOOXXXXXXXXXXXXX | 341 |
| 2707 | G | A * T * T * G * G * G * A * mG * mG | X | |
| WV- | UGUCCAGCUUUAUUGGG | mU * fG * mU fC * mC fA * mG fC * mU fU * mU | XXOXOXOXOXOXOXXXXXX | 342 |
| 2708 | AGTU | fA * mU fU * mG * fG * mG * fA * mG * T * mU | X | |
| WV- | UGUCCAGCUUUA | mU * fG * mU fC * mC fA * mG fC * mU fU * mU | XXOXOXOXOXOXOXXXXXX | 343 |
| 2709 | UUGGGAGTU | fA * mU fU * mG * fG * mG * fA * mG * AMC6T * | X | |
| | | mU | | |
| WV- | UGUCCAGCUUUA | mU * fG * mU fC * mC fA * mG fC * mU fU * mU | XXOXOXOXOXO | 344 |
| 2710 | UUGGGAGGCCATU | fA * mU fU * G * G * G * A * G * G * C * C * A * T | XOXXXXXXXXXXX | |
| | | * mU | | |
| WV- | UGUCCAGCUUUA | mU * fG * mU fC * mC fA * mG fC * mU fU * mU | XXOXOXOXOXO | 345 |
| 2711 | UUGGGAGGCCATU | fA * mU fU * G * G * G * A * G * G * C * C * A * | XOXXXXXXXXXXX | |
| | | AMC6T * mU | | |
| WV- | UGUCCAGCUUUAUUGGG | POmU * fG * mU fC * mC fA * mG fC * mU fU * | XXOXOXOXOXOXOXXXXO | 346 |
| 2712 | UU | mU fA * mU fU * mG * fG * mG * mUmU | | |
| WV- | UGUCCAGCUUUAUUGGGT | POmU * fG * mU fC * mC fA * mG fC * mU fU * | XXOXOXOXOXOXOXXXXX | 347 |
| 2713 | U | mU fA * mU fU * mG * fG * mG * T * mU | | |
| WV- | UGUCCAGCUUUAUUGUU | POmU * fG * mU fC * mC fA * mG fC * mU fU * | XXOXOXOXOXOXOXXO | 348 |
| 2714 | | mU fA * mU fU * mG * mUmU | | |
| WV- | UGUCCAGCUUUAUUGTU | POmU * fG * mU fC * mC fA * mG fC * mU fU * | XXOXOXOXOXOXOXXX | 349 |
| 2715 | | mU fA * mU fU * mG * T * mU | | |
| WV- | TGTCCAGCTUTATUGGGAG | POT * fGT * fCC * fAG * fCT * fUT * fAT * fUG * | XOXOXOXOXOXOXOXOXX | 350 |
| 2716 | UU | fGG * fA * G * mUmU | XO | |
| WV- | TGTCCAGCTUTATUGGGAG | POT * fGT * fCC * fAG * C * T * fUT * fAT * fUG * | XOXOXOXXXOXOXOXOXXX | 351 |
| 2717 | UU | fGG * fA * G * mUmU | O | |
| WV- | TGTCCAGCTUUATUGGGA | POT * fGT * fCC * fAG * fCT * fU fU fAT * fUG * | XOXOXOXOXOOOXOXOXX | 352 |
| 2718 | GUU | fGG * fA * G * mUmU | XO | |
| WV- | TGTCCAGCTUUATUGGGA | POT * fGT * fCC * fAG * C * T * fU fU fAT * fUG * | XOXOXOXXXOOOXOXOXX | 353 |
| 2719 | GUU | fGG * fA * G * mUmU | XO | |
| WV- | AGUCCAGCUUUAUUGGGA | POA * fG * mU fC * mC fA * mG fC * mU fU * mU | XXOXOXOXOXOXOXXXXXX | 354 |
| 2720 | GUU | fA * mU fU * mG * fG * mG * fA * mG * mUmU | O | |
| WV- | AGUCCAGCUUUAUUGGGA | A * fG * mU fC * mC fA * mG fC * mU fU * mU fA | XXOXOXOXOXOXOXXXXXX | 355 |
| 2721 | GUU | * mU fU * mG * fG * mG * fA * mG * mUmU | O | |
| WV- | UGUCCAGCTTTATTGGGAG | Mod001L001mU * mGmUmCmC * A * G * C * T | OXOOOXXXXXXXXXXXOOO | 356 |
| 2722 | G | * T * T * A * T * T * G * mGmGmAmG * mG | X | |
| WV- | UGUCCAGCTTTATTGGGAG | Mod001L001mU * mGmUmCmC * A * G * C * T | OXOOOXXXXXXXXXXXXXO | 357 |
| 2723 | G | * T * T * A * T * T * G * G * G * mAmG * mG | X | |
| WV- | UGUCCAGCTTTATTGGGAG | Mod001L001mU * mGmUmCmCmA * G * C * T * | OXOOOXXXXXXXXXXXXX | 358 |
| 2724 | G | T * T * A * T * T * G * G * G * A * mG * mG | X | |
| WV- | UGUCCAGCTTTATTGGGAG | Mod001L001mU * SmGmUmCmC * SA * SG * SC | OSOOOSSSSSSRSSSSOOOS | 359 |
| 2725 | G | * ST * ST * ST * RA * ST * ST * SG * | | |
| | | SmGmGmAmG * SmG | | |
| WV- | UGUCCAGCTTTATTGGGAG | Mod001L001mU * SmGmUmCmC * SA * SG * SC | OSOOOSSSSSSSSSSRSSOS | 360 |
| 2726 | G | * ST * ST * ST * SA * ST * ST * SG * RG * SG * | | |
| | | SmAmG * SmG | | |
| WV- | UGUCCAGCTTTATTGGGAG | Mod001L001mU * SmGmUmCmCmA * SG * SC * | OSOOOOSSSSSSSSSRSSSS | 361 |
| 2727 | G | ST * ST * ST * SA * ST * ST * SG * RG * SG * SA * | | |
| | | SmG * SmG | | |
| WV- | UGUCCAGCTTTATTGGGAG | L001mU * mG * mU * mC * mC * A * G * C * T * | OXXXXXXXXXXXXXXXXXXX | 362 |
| 2815 | G | T * T * A * T * T * G * mG * mG * mA * mG * mG | | |
| WV- | UGUCCAGCTTTATTGGGAG | Mod001L001mU * mG * mU * mC * mC * A * G | OXXXXXXXXXXXXXXXXXXX | 363 |
| 2816 | G | * C * T * T * T * A * T * T * G * mG * mG * mA * | | |
| | | mG * mG | | |
| WV- | TGUCCAGCUUUAUUGGGA | T * fG * mU fC * mC fA * mG fC * mU fU * mU fA | XXOXOXOXOXOXOXXXXXX | 364 |
| 2817 | GTU | * mU fU * mG * fG * mG * fA * mG * T * mU | X | |
| WV- | TGUCCAGCUUUAUUGGGA | T * fG * mU fC * mC fA * mG fC * mU fU * mU fA | XXOXOXOXOXOXOXXXXXX | 365 |
| 2818 | GTU | * mU fU * mG * fG * mG * fA * mG * AMC6T * | X | |
| | | mU | | |
| WV- | TGUCCAGCUUUA | T * fG * mU fC * mC fA * mG fC * mU fU * mU fA | XXOXOXOXOXO | 366 |
| 2819 | UUGGGAGGCCATU | * mUfU * G * G * G * A * G * G * C * C * A * T * | XOXXXXXXXXXXX | |
| | | mU | | |
| WV- | TGUCCAGCUUUA | T * fG * mU fC * mC fA * mG fC * mU fU * mU fA | XXOXOXOXOXO | 367 |
| 2820 | UUGGGAGGCCATU | * mUfU * G * G * G * A * G * G * C * C * A * | XOXXXXXXXXXXX | |
| | | AMC6T * mU | | |
| WV- | TGUCCAGCUUUAUUGGGA | POT * fG * mU fC * mC fA * mG fC * mU fU * mU | XXOXOXOXOXOXOXXXXXX | 368 |
| 3021 | GTU | fA * mU fU * mG * fG * mG * fA * mG * T * mU | X | |
| WV- | TGUCCAGCUUUAUUGGGA | T * fG * mU fC * mC fA * mG fC * mU fU * mU fA | XXOXOXOXOXOXOXXXXXX | 369 |
| 3068 | GTU | * mU fU * mG * fG * mG * fA * mG * TGaNC6T * | X | |
| | | mU | | |
| WV- | TGUCCAGCUUUA | T * fG * mU fC * mC fA * mG fC * mU fU * mU fA | XXOXOXOXOXOXOXXXXXX | 370 |
| 3069 | UUGGGAGGCCATU | * mUfU * G * G * G * A * G * G * C * C * A * | XXXXX | |
| | | TGaNC6T * mU | | |
| WV- | UGUCCAGCTTTATTGGGAG | mU * SmGmUmCmC * SA * SG * SC * ST * ST * | SOOOSSSSSSSSDSDOOOS | 371 |
| 3090 | G | ST * SA * ST:T * SG:mGmGmAmG * SmG | | |
| WV- | UGUCCAGCTTTATTGGGAG | mU * SmGmUmCmC * SA * SG * SC * ST * ST * | SOOOSSSSSSSDSDSOOOS | 372 |
| 3091 | G | ST * SA:T * ST:G * SmGmGmAmG * SmG | | |
| WV- | UGUCCAGCTTTATTGGGAG | mU * SmGmUmCmC * SA * SG * SC * ST * ST * | SOOOSSSSSSDSDSSOOOS | 373 |
| 3092 | G | ST:A * ST:T * SG * SmGmGmAmG * SmG | | |
| WV- | TGUCCAGCUUUAUUGGGA | POT * fG * mU fC * mC fA * mG fC * mU fU * mU | XXOXOXOXOXOXOXOOOO | 374 |
| 3122 | GTU | fA * mU fU * mG fGmG fAmG * T * mU | XX | |
| WV- | TGUCCAGCUUUAUUGGGA | POT * S fG * SmU fC * SmC fA * SmG fC * SmU fU | SSOSOSOSOSOSOSOOOOS | 375 |
| 3123 | GTU | * SmU fA * SmU fU * SmG fGmG fAmG * ST * | S | |
| | | SmU | | |
| WV- | TAUAGCAGCUUCUUGUCC | POT * fA * mU fA * mG fC * mA fG * mC fU * mU | XXOXOXOXOXOXOXOOOO | 376 |
| 3124 | ATU | fC * mU fU * mG fUmC fCmA * T * mU | XX | |
| WV- | TUAGCAGCUUCUUGUCCA | POT * fU * mA fG * mC fA * mG fC * mU fU * mC | XXOXOXOXOXOXOXOOOO | 377 |
| 3125 | GTU | fU * mU fG * mU fCmC fAmG * T * mU | XX | |
| WV- | TAGCAGCUUCUUGUCCAG | POT * fA * mG fC * mA fG * mC fU * mU fC * mU | XXOXOXOXOXOXOXOOOO | 378 |
| 3126 | CTU | fU * mG fU * mC fCmA fGmC * T * mU | XX | |
| WV- | TGCAGCUUCUUGUCCAGC | POT * fG * mC fA * mG fC * mU fU * mC fU * mU | XXOXOXOXOXOXOXOOOO | 379 |
| 3127 | UTU | fG * mU fC * mC fAmG fCmU * T * mU | XX | |
| WV- | TCAGCUUCUUGUCCAGCU | POT * fC * mA fG * mC fU * mU fC * mU fU * mG | XXOXOXOXOXOXOXOOOO | 380 |
| 3128 | UTU | fU * mC fC * mA fGmC fUmU * T * mU | XX | |
| WV- | TGCUUCUUGUCCAGCUUU | POT * fG * mC fU * mU fC * mU fU * mG fU * mC | XXOXOXOXOXOXOXOOOO | 381 |
| 3129 | ATU | fC * mA fG * mC fUmU fUmA * T * mU | XX | |
| WV- | TCUUCUUGUCCAGCUUUA | POT * fC * mU fU * mC fU * mU fG * mU fC * mC | XXOXOXOXOXOXOXOOOO | 382 |
| 3130 | UTU | fA * mG fC * mU fUmU fAmU * T * mU | XX | |
| WV- | TUUCUUGUCCAGCUUUAU | POT * fU * mU fC * mU fU * mG fU * mC fC * mA | XXOXOXOXOXOXOXOOOO | 383 |
| 3131 | UTU | fG * mC fU * mU fUmA fUmU * T * mU | XX | |
| WV- | TUCUUGUCCAGCUUUAUU | POT * fU * mC fU * mU fG * mU fC * mC fA * mG | XXOXOXOXOXOXOXOOOO | 384 |
| 3132 | GTU | fC * mU fU * mU fAmU fUmG * T * mU | XX | |
| WV- | TCUUGUCCAGCUUUAUUG | POT * fC * mU fU * mG fU * mC fC * mA fG * mC | XXOXOXOXOXOXOXOOOO | 385 |
| 3133 | GTU | fU * mU fU * mA fUmU fGmG * T * mU | XX | |
| WV- | TUUGUCCAGCUUUAUUGG | POT * fU * mU fG * mU fC * mC fA * mG fC * mU | XXOXOXOXOXOXOXOOOO | 386 |
| 3134 | GTU | fU * mU fA * mU fUmG fGmG * T * mU | XX | |
| WV- | TUGUCCAGCUUUAUUGGG | POT * fU * mG fU * mC fC * mA fG * mC fU * mU | XXOXOXOXOXOXOXOOOO | 387 |
| 3135 | ATU | fU * mA fU * mU fGmG fGmA * T * mU | XX | |
| WV- | TAGCUUCUUGUCCAGCUU | POT * fA * mG fC * mU fU * mC fU * mU fG * mU | XXOXOXOXOXOXOXOOOO | 388 |
| 3136 | UTU | fC * mC fA * mG fCmU fUmU * T * mU | XX | |
| WV- | TGGUCUCAGGCAGCCACG | POT * fG * mG fU * mC fU * mC fA * mG fG * mC | XXOXOXOXOXOXOXOOOO | 389 |
| 3137 | GTU | fA * mG fC * mC fAmC fGmG * T * mU | XX | |
| WV- | TAUAGCAGCUUCUUGUCC | POT * S fA * SmU fA * SmG fC * SmA fG * SmC fU | SSOSOSOSOSOSOSOOOOS | 390 |
| 3138 | ATU | * SmU fC * SmU fU * SmG fUmC fCmA * ST * | S | |
| | | SmU | | |
| WV- | TUAGCAGCUUCUUGUCCA | POT * S fU * SmA fG * SmC fA * SmG fC * SmU | SSOSOSOSOSOSOSOOOOS | 391 |
| 3139 | GTU | fU * SmC fU * SmU fG * SmU fCmC fAmG * ST * | S | |
| | | SmU | | |
| WV- | TAGCAGCUUCUUGUCCAG | POT * S fA * SmG fC * SmA fG * SmC fU * SmU fC | SSOSOSOSOSOSOSOOOOS | 392 |
| 3140 | CTU | * SmU fU * SmG fU * SmC fCmA fGmC * ST * | S | |
| | | SmU | | |
| WV- | TGCAGCUUCUUGUCCAGC | POT * S fG * SmC fA * SmG fC * SmU fU * SmC fU | SSOSOSOSOSOSOSOOOOS | 393 |
| 3141 | UTU | * SmU fG * SmU fC * SmC fAmG fCmU * ST * | S | |
| | | SmU | | |
| WV- | TCAGCUUCUUGUCCAGCU | POT * S fC * SmA fG * SmC fU * SmU fC * SmU fU | SSOSOSOSOSOSOSOOOOS | 394 |
| 3142 | UTU | * SmG fU * SmC fC * SmA fGmC fUmU * ST * | S | |
| | | SmU | | |
| WV- | TGCUUCUUGUCCAGCUUU | POT * S fG * SmC fU * SmU fC * SmU fU * SmG | SSOSOSOSOSOSOSOOOOS | 395 |
| 3143 | ATU | fU * SmC fC * SmA fG * SmC fUmU fUmA * ST * | S | |
| | | SmU | | |
| WV- | TCUUCUUGUCCAGCUUUA | POT * S fC * SmU fU * SmC fU * SmU fG * SmU | SSOSOSOSOSOSOSOOOOS | 396 |
| 3144 | UTU | fC * SmC fA * SmG fC * SmU fUmU fAmU * ST * | S | |
| | | SmU | | |
| WV- | TUUCUUGUCCAGCUUUAU | POT * S fU * SmU fC * SmU fU * SmG fU * SmC | SSOSOSOSOSOSOSOOOOS | 397 |
| 3145 | UTU | fC * SmA fG * SmC fU * SmU fUmA fUmU * ST * | S | |
| | | SmU | | |
| WV- | TUCUUGUCCAGCUUUAUU | POT * S fU * SmC fU * SmU fG * SmU fC * SmC fA | SSOSOSOSOSOSOSOOOOS | 398 |
| 3146 | GTU | * SmG fC * SmU fU * SmU fAmU fUmG * ST * | S | |
| | | SmU | | |
| WV- | TCUUGUCCAGCUUUAUUG | POT * S fC * SmU fU * SmG fU * SmC fC * SmA fG | SSOSOSOSOSOSOSOOOOS | 399 |
| 3147 | GTU | * SmC fU * SmU fU * SmA fUmU fGmG * ST * | S | |
| | | SmU | | |
| WV- | TUUGUCCAGCUUUAUUGG | POT * S fU * SmU fG * SmU fC * SmC fA * SmG fC | SSOSOSOSOSOSOSOOOOS | 400 |
| 3148 | GTU | * SmU fU * SmU fA * SmU fUmG fGmG * ST * | S | |
| | | SmU | | |
| WV- | TUGUCCAGCUUUAUUGGG | POT * S fU * SmG fU * SmC fC * SmA fG * SmC fU | SSOSOSOSOSOSOSOOOOS | 401 |
| 3149 | ATU | * SmU fU * SmA fU * SmU fGmG fGmA * ST * | S | |
| | | SmU | | |
| WV- | TAGCUUCUUGUCCAGCUU | POT * S fA * SmG fC * SmU fU * SmC fU * SmU | SSOSOSOSOSOSOSOOOOS | 402 |
| 3150 | UTU | fG * SmU fC * SmC fA * SmG fCmU fUmU * ST * | S | |
| | | SmU | | |
| WV- | TGGUCUCAGGCAGCCACG | POT * S fG * SmG fU * SmC fU * SmC fA * SmG | SSOSOSOSOSOSOSOOOOS | 403 |
| 3151 | GTU | fG * SmC fA * SmG fC * SmC fAmC fGmG * ST * | S | |
| | | SmU | | |
| WV- | TAGCUUCUUGUCCAGCUU | T * fA * mG fC * mU fU * mC fU * mU fG * mU fC | XXOXOXOXOXOXOXXXXXX | 404 |
| 3242 | UTU | * mC fA * mG * fC * mU * fU * mU * T * mU | X | |
| WV- | TAGCUUCUUGUCCAGCUU | T * fA * mG fC * mU fU * mC fU * mU fG * mU fC | XXOXOXOXOXOXOXXXXXX | 405 |
| 3243 | UTU | * mC fA * mG * fC * mU * fU * mU * TGaNC6T * | X | |
| | | mU | | |
| WV- | TAGCUUCUUGUCCAGCUU | VPT * fA * mG fC * mU fU * mC fU * mU fG * mU | XXOXOXOXOXOXOXXXXXX | 406 |
| 3244 | UTU | fC * mC fA * mG * fC * mU * fU * mU * T * mU | X | |
| WV- | TAGCUUCUUGUCCAGCUU | VPT * fA * mG fC * mU fU * mC fU * mU fG * mU | XXOXOXOXOXOXOXXXXXX | 407 |
| 3245 | UTU | fC * mC fA * mG * fC * mU * fU * mU * TGaNC6T | X | |
| | | * mU | | |
| WV- | TAGCUUCUUGUCCAGCUU | Mod001L001T * fA * mG fC * mU fU * mC fU * | OXXOXOXOXOXOXOXXXXX | 408 |
| 3246 | UTU | mU fG * mU fC * mC fA * mG * fC * mU * fU * | XX | |
| | | mU * T * mU | | |
| WV- | TGUCCAGCUUUAUUGGGA | VPT * fG * mU fC * mC fA * mG fC * mU fU * mU | XXOXOXOXOXOXOXXXXXX | 409 |
| 3247 | GTU | fA * mU fU * mG * fG * mG * fA * mG * T * mU | X | |
| WV- | TGUCCAGCUUUAUUGGGA | VPT * fG * mU fC * mC fA * mG fC * mU fU * mU | XXOXOXOXOXOXOXXXXXX | 410 |
| 3248 | GTU | fA * mU fU * mG * fG * mG * fA * mG * | X | |
| | | TGaNC6T * mU | | |
| WV- | TGUCCAGCUUUAUUGGGA | Mod001L001T * fG * mU fC * mC fA * mG fC * | OXXOXOXOXOXOXOXXXXX | 411 |
| 3249 | GTU | mU fU * mU fA * mU fU * mG * fG * mG * fA * | XX | |
| | | mG * T * mU | | |
| WV- | UGUCCAGCTTTATTGGGAG | fU * mGmUmCmC * A * G * C * T * T * T * A * T | XOOOXXXXXXXXXXXOOOX | 412 |
| 3474 | G | * T * G * mGmGmAmG * fG | | |
| WV- | UGUCCAGCTTTATTGGGAG | fU * fG fU fC fC * A * G * C * T * T * T * A * T * T | XOOOXXXXXXXXXXXOOOX | 413 |
| 3475 | G | * G * fG fG fA fG * fG | | |
| WV- | UGUCCAGCTTTATTGGGAG | fU * mG fU * mC fC * A * G * C * T * T * T * A * T | XOXOXXXXXXXXXXXXOXX | 414 |
| 3476 | G | * T * G * fG * mG fA * mG * fG | | |
| WV- | UGUCCAGCTTTATTGGGAG | fU * mGmUmC fC * A * G * C * T * T * T * A * T | XOOOXXXXXXXXXXXOOOX | 415 |
| 3477 | G | * T * G * fGmGmAmG * fG | | |
| WV- | UGUCCAGCTTTATTGGGAG | fU * fG * fU * fC * fC * A * G * C * T * T * T * A * | XXXXXXXXXXXXXXXXXXX | 416 |
| 3478 | G | T * T * G * fG * fG * fA * fG * fG | | |
| WV- | UGUCCAGCTTTATTGGGAG | fU * SmGmUmCmC * SA * SG * SC * ST * ST * ST | SOOOSSSSSSRSSSSOOOS | 417 |
| 3479 | G | * RA * ST * ST * SG * SmGmGmAmG * S fG | | |
| WV- | UGUCCAGCTTTATTGGGAG | fU * S fG fU fC fC * SA * SG * SC * ST * ST * ST * | SOOOSSSSSSRSSSSOOOS | 418 |
| 3480 | G | RA * ST * ST * SG * S fG fG fA fG * S fG | | |
| WV- | UGUCCAGCTTTATTGGGAG | fU * SmG fU * SmC fC * SA * SG * SC * ST * ST * | SOSOSSSSSSRSSSSSOSS | 419 |
| 3481 | G | ST * RA * ST * ST * SG * S fG * SmG fA * SmG * S | | |
| | | fG | | |
| WV- | UGUCCAGCTTTATTGGGAG | fU * SmGmUmC fC * SA * SG * SC * ST * ST * ST | SOOOSSSSSSRSSSSOOOS | 420 |
| 3482 | G | * RA * ST * ST * SG * S fGmGmAmG * S fG | | |
| WV- | UGUCCAGCTTTATTGGGAG | fU * S fG * S fU * S fC * S fC * SA * SG * SC * ST * | SSSSSSSSSSRSSSSSSSS | 421 |
| 3483 | G | ST * ST * RA * ST * ST * SG * S fG * S fG * S fA * S | | |
| | | fG * S fG | | |
| WV- | UGUCCAGCTTTATTGGGAG | fU * mGmUmCmC * A * G * C * T * T * T * A * T | XOOOXXXXXXXXXXXXXOX | 422 |
| 3484 | G | * T * G * G * G * mAmG * fG | | |
| WV- | UGUCCAGCTTTATTGGGAG | fU * fG fU fC fC * A * G * C * T * T * T * A * T * T | XOOOXXXXXXXXXXXXXOX | 423 |
| 3485 | G | * G * G * G * fA fG * fG | | |
| WV- | UGUCCAGCTTTATTGGGAG | fU * mG fU * mC fC * A * G * C * T * T * T * A * T | XOXOXXXXXXXXXXXXXXX | 424 |
| 3486 | G | * T * G * G * G * fA * mG * fG | | |
| WV- | UGUCCAGCTTTATTGGGAG | fU * mGmUmC fC * A * G * C * T * T * T * A * T | XOOOXXXXXXXXXXXXXOX | 425 |
| 3487 | G | * T * G * G * G * fAmG * fG | | |
| WV- | UGUCCAGCTTTATTGGGAG | fU * fG * fU * fC * fC * A * G * C * T * T * T * A * | XXXXXXXXXXXXXXXXXXX | 426 |
| 3488 | G | T * T * G * G * G * fA * fG * fG | | |
| WV- | UGUCCAGCTTTATTGGGAG | fU * SmGmUmCmC * SA * SG * SC * ST * ST * ST | SOOOSSSSSSSSSSRSSOS | 427 |
| 3489 | G | * SA * ST * ST * SG * RG * SG * SmAmG * S fG | | |
| WV- | UGUCCAGCTTTATTGGGAG | fU * S fG fU fC fC * SA * SG * SC * ST * ST * ST * | SOOOSSSSSSSSSSRSSOS | 428 |
| 3490 | G | SA * ST * ST * SG * RG * SG * S fA fG * S fG | | |
| WV- | UGUCCAGCTTTATTGGGAG | fU * SmG fU * SmC fC * SA * SG * SC * ST * ST * | SOSOSSSSSSSSSSRSSSS | 429 |
| 3491 | G | ST * SA * ST * ST * SG * RG * SG * S fA * SmG * | S | |
| | | fG | | |
| WV- | UGUCCAGCTTTATTGGGAG | fU * SmGmUmC fC * SA * SG * SC * ST * ST * ST | SOOOSSSSSSSSSSRSSOS | 430 |
| 3492 | G | * SA * ST * ST * SG * RG * SG * S fAmG * S fG | | |
| WV- | UGUCCAGCTTTATTGGGAG | fU * S fG * S fU * S fC * S fC * SA * SG * SC * ST * | SSSSSSSSSSSSSSRSSSS | 431 |
| 3493 | G | ST * ST * SA * ST * ST * SG * RG * SG * S fA * S fG | | |
| | | * S fG | | |
| WV- | UGUCCAGCTTTATTGGGAG | fU * mGmUmCmC * A * G * C * T * T * T * A * T | XOOOXXXXXXXXXXXXXXX | 432 |
| 3494 | G | * T * G * G * G * A * mG * fG | | |
| WV- | UGUCCAGCTTTATTGGGAG | fU * fG fU fC fC * A * G * C * T * T * T * A * T * T | XOOOXXXXXXXXXXXXXXX | 433 |
| 3495 | G | * G * G * G * A * fG * fG | | |
| WV- | UGUCCAGCTTTATTGGGAG | fU * mG fU * mc fC * A * G * C * T * T * T * A * T | XOXOXXXXXXXXXXXXXXX | 434 |
| 3496 | G | * T * G * G * G * A * mG * fG | | |
| WV- | UGUCCAGCTTTATTGGGAG | fU * mGmUmC fC * A * G * C * T * T * T * A * T | XOOOXXXXXXXXXXXXXXX | 435 |
| 3497 | G | * T * G * G * G * A * mG * fG | | |
| WV- | UGUCCAGCTTTATTGGGAG | fU * fG * fU * fC * fC * A * G * C * T * T * T * A * | XXXXXXXXXXXXXXXXXXX | 436 |
| 3498 | G | T * T * G * G * G * A * fG * fG | | |
| WV- | UGUCCAGCTTTATTGGGAG | fU * SmGmUmCmC * SA * SG * SC * ST * ST * ST | SOOOSSSSSSSSSSRSSSS | 437 |
| 3499 | G | * SA * ST * ST * SG * RG * SG * SA * SmG * S fG | | |
| WV- | UGUCCAGCTTTATTGGGAG | fU * S fG fU fC fC * SA * SG * SC * ST * ST * ST * | SOOOSSSSSSSSSSRSSSS | 438 |
| 3500 | G | SA * ST * ST * SG * RG * SG * SA * S fG * S fG | | |
| WV- | UGUCCAGCTTTATTGGGAG | fU * SmG fU * SmC fC * SA * SG * SC * ST * ST * | SOSOSSSSSSSSSSRSSSS | 439 |
| 3501 | G | * ST * SA * ST * ST * SG * RG * SG * SA * SmG * S | | |
| | | fG | | |
| WV- | UGUCCAGCTTTATTGGGAG | fU * SmGmUmC fC * SA * SG * SC * ST * ST * ST | SOOOSSSSSSSSSSRSSSS | 440 |
| 3502 | G | * SA * ST * ST * SG * RG * SG * SA * SmG * S fG | | |
| WV- | UGUCCAGCTTTATTGGGAG | fU * S fG * S fU * S fC * S fC * SA * SG * SC * ST * | SSSSSSSSSSSSSSSRSSSS | 441 |
| 3503 | G | ST * ST * SA * ST * ST * SG * RG * SG * SA * S fG | | |
| | | * S fG | | |
| WV- | UGUCCAGCTTTATTGGGAG | fU * mGmUmC fC * A * G * C * T * T * T * A * T | XOOOXXXXXXXXXXXXXXX | 442 |
| 3504 | G | * T * G * G * G * A * fG * fG | | |
| WV- | UGUCCAGCTTTATTGGGAG | fU * SmGmUmC fC * SA * SG * SC * ST * ST * ST | SOOOSSSSSSSSSSRSSSS | 443 |
| 3505 | G | * SA * ST * ST * SG * RG * SG * SA * S fG * S fG | | |
| WV- | TAGCUUCUUGUCCAGCUU | T * fA * mG fC * mU fU * mC fU * mU fG * mU fC | XXOXOXOXOXOXOXXXXXX | 444 |
| 3525 | UTU | * mC fA * mG * fC * mU * fU * mU * AMC6T * | X | |
| | | mU | | |
| WV- | TAGCUUCUUGUCCAGCUU | VPT * fA * mG fC * mU fU * mC fU * mU fG * mU | XXOXOXOXOXOXOXXXXXX | 445 |
| 3526 | UTU | fC * mC fA * mG * fC * mU * fU * mU * AMC6T * | X | |
| | | mU | | |
| WV- | TAGCUUCUUGUCCAGCUU | L001T * fA * mG fC * mU fU * mC fU * mU fG * | OXXOXOXOXOXOXOXXXXX | 446 |
| 3527 | UTU | mU fC * mC fA * mG * fC * mU * fU * mU * T * | XX | |
| | | mU | | |
| WV- | TGUCCAGCUUUAUUGGGA | VPT * fG * mU fC * mC fA * mG fC * mU fU * mU | XXOXOXOXOXOXOXXXXXX | 447 |
| 3528 | GTU | fA * mU fU * mG * fG * mG * fA * mG * AMC6T * | X | |
| | | mU | | |
| WV- | TGUCCAGCUUUAUUGGGA | L001T * fG * mU fC * mC fA * mG fC * mU fU * | OXXOXOXOXOXOXOXXXXX | 448 |
| 3529 | GTU | mU fA * mU fU * mG * fG * mG * fA * mG * T * | XX | |
| | | mU | | |
| WV- | CCUCCCAAUAAAGCUGGA | rC rC rU rC rC rC rA rA rU rA rA rA rG rC rU rG rG | OOOOOOOOOO | 449 |
| 3530 | CA | rA rC rA | OOOOOOOOO | |
| WV- | TGUCCAGCUUUAUUGGGA | PHT * fG * mU fC * mC fA * mG fC * mU fU * mU | XXOXOXOXOXOXOXXXXXX | 450 |
| 3531 | GTU | fA * mU fU * mG * fG * mG * fA * mG * T * mU | X | |
| WV- | TGUCCAGCUUUAUUGGGA | PHT * fG * mU fC * mC fA * mG fC * mU fU * mU | XXOXOXOXOXOXOXXXXXX | 451 |
| 3532 | GTU | fA * mU fU * mG * fG * mG * fA * mG * | X | |
| | | TGaNC6T * mU | | |
| WV- | TGTCCAGCTTTATTGGGAG | Mod001L001Teo * Geo * Teo * Ceo * Ceo * A * | OXXXXXXXXXXXXXXXXXXX | 452 |
| 3533 | G | G * C * T * T * T * A * T * T * G * Geo * Geo * | | |
| | | Aeo * Geo * Geo | | |
| WV- | AGCUUCTTGTCCAGCUUU | Mod001L001mA * mG * mC * mU * mU * C * T * | OXXXXXXXXXXXXXXXXXXX | 453 |
| 3534 | AU | T * G * T * C * C * A * G * C * mU * mU * mU * | | |
| | | mA * mU | | |
| WV- | AGCTTCTTGTCCAGCTTTAT | Mod001L001Aeo * Geo * Ceo * Teo * Teo * C * T | OXXXXXXXXXXXXXXXXXXX | 454 |
| 3535 | | * T * G * T * C * C * A * G * C * Teo * Teo * Teo * | | |
| | | Aeo * Teo | | |
| WV- | CCACCAAGACCGCCAAGGA | rC rC rA rC rC rA rA rG rA rC rC rG rC rC rA rA rG | OOOOOOOOOOOOOOOO | 455 |
| 3795 | UGCAC | rG rA rU rG rC rA rC | OOOOOOO | |
| WV- | ACCGCCAAGGAUGCACUG | rA rC rC rG rC rC rA rA rG rG rA rU rG rC rA rC rU | OOOOOOOOOOOOOOOO | 456 |
| 3796 | AGCAGC | rG rA rG rCA rG rC | OOOOOOO | |
| WV- | AGCAGCGUGCAGGAGUCC | rA rG rC rA rG rC rG rU rG rC rA rG rG rA rG rU rC | OOOOOOOOOOOOOOOO | 457 |
| 3797 | CAGGUG | rC rC rAG rG rU rG | OOOOOOO | |
| WV- | GGAGUCCCAGGUGGCCCA | rG rG rA rG rU rC rC rC rA rG rG rU rG rG rC rC rC | OOOOOOOOOOOOOOOO | 458 |
| 3798 | GCAGGC | rA rG rC rA rG rG rC | OOOOOOO | |
| WV- | CAGGGGCUGGGUGACCGA | rC rA rG rG rG rG rC rU rG rG rG rU rG rA rC rC | OOOOOOOOOOOOOOOO | 459 |
| 3799 | UGGCUU | rG rA rU rG rG rC rU rU | OOOOOOOO | |
| WV- | GGCUGGGUGACCGAUGGC | rG rG rC rU rG rG rG rU rG rA rC rC rG rA rU rG | OOOOOOOOOOOOOOOO | 460 |
| 3800 | UUCAGU | rG rC rU rU rC rA rG rU | OOOOOOO | |
| WV- | CUGGAGCACCGUUAAGGA | rC rU rG rG rA rG rC rA rC rC rG rU rU rA rA rG rG | OOOOOOOOOOOOOOOO | 461 |
| 3801 | CAAGUU | rA rC rA rA rG rU rU | OOOOOOO | |
| WV- | CAGCCGUGGCUGCCUGAG | rC rA rG rC rC rG rU rG rG rC rU rG rC rC rU rG rA | OOOOOOOOOOOOOOOO | 462 |
| 3802 | ACCUCA | rG rA rC rC rU rC rA | OOOOOOO | |
| WV- | GCCGUGGCUGCCUGAGAC | rG rC rC rG rU rG rG rC rU rG rC rC rU rG rA rG rA | OOOOOOOOOOOOOOOO | 463 |
| 3803 | CUCAAU | rC rC rU rC rA rA rU | OOOOOOO | |
| WV- | CUUGGGUCCUGCAAUCUC | rC rU rU rG rG rG rU rC rC rU rG rCA rA rU rC rU | OOOOOOOOOOOOOOOO | 464 |
| 3804 | CAGGGCU | rC rC rA rG rG rG rC rU | OOOOOOOO | |
| WV- | CUGGCCUCCCAAUAAAGC | rC rU rG rG rC rC rU rC rC rC rA rA rU rA rA rA rG | OOOOOOOOOOOOOOOO | 465 |
| 3805 | UGGACA | rC rU rG rG rA rC rA | OOOOOOO | |
| WV- | GGCCUCCCAAUAAAGCUG | rG rG rC rC rU rC rC rC rA rA rU rA rA rA rG rC rU | OOOOOOOOOOOOOOOO | 466 |
| 3806 | GACAAG | rG rG rA rC rA rA rG | OOOOOOO | |
| WV- | AUGCACUGAGCAG | rA rU rG rC rA rC rU rG rA rG rC rA rG rC rG rU rG | OOOOOOOOOOOOO | 467 |
| 3807 | CGUGCAGGAGUCCCAGGU | rC rA rG rG rA rG rU rC rC rC rA rG rG rU rG | OOOOOOOOOOOOOOOO | |
| | G | | OO | |
| WV- | GGCCAGGGGCUGG | rG rG rC rC rA rG rG rG rG rC rU rG rG rG rU rG | OOOOOOOOOOOOO | 468 |
| 3808 | GUGACCGAUGGCUUCAGU | rA rC rC rG rA rU rG rG rC rU rU rC rA rG rU | OOOOOOOOOOOOOOOO | |
| | | O | | |
| WV- | CUUCAGCCGUGGC | rC rU rU rC rA rG rC rC rG rU rG rG rC rU rG rC rC | OOOOOOOOOOOOO | 469 |
| 3809 | UGCCUGAGACCUCAAUA | rU rG rA rG rA rC rC rU rC rA rA rU rA | OOOOOOOOOOOOOOOO | |
| WV- | CUCCUUGGGUCCU | rC rU rC rC rU rU rG rG rG rU rC rC rU rG rC rA rA | OOOOOOOOOOOOO | 470 |
| 3810 | GCAACUCCAGGGCUGC | rC rU rC rC rA rG rG rG rC rU rG rC | OOOOOOOOOOOOOOO | |
| WV- | GCUGGCCUCCCAA | rG rC rU rG rG rC rC rU rC rC rC rA rA rU rA rA rA | OOOOOOOOOOOOO | 471 |
| 3811 | UAAAGCUGGACAAGAAG | rG rC rU rG rG rA rC rA rA rG rA rA rG | OOOOOOOOOOOOOOOO | |
| WV- | TGUCCAGCUUUAUUGGGA | T * fG * mU fC * mC fA * mG fC * mU fU * mU fA | XXOXOXOXOXOXOXXXXXX | 472 |
| 3813 | GUU | * mU fU * mG * fG * mG * fA * mG * mUmU | O | |
| WV- | AGUCCAGCUUUAUUGGGA | A * fG * mU fC * mC fA * mG fC * mU fU * mU fA | XXOXOXOXOXOXOXXXXXX | 473 |
| 3814 | GTU | * mU fU * mG * fG * mG * fA * mG * T * mU | X | |
| WV- | TGUCCAGCUUUAUUGGGA | POT * fG * mU fC * mC fA * mG fC * mU fU * mU | XXOXOXOXOXOXOXXXXXX | 474 |
| 3815 | GUU | fA * mU fU * mG * fG * mG * fA * mG * mUmU | O | |
| WV- | AGUCCAGCUUUAUUGGGA | POA * fG * mU fC * mC fA * mG fC * mU fU * mU | XXOXOXOXOXOXOXXXXXX | 475 |
| 3816 | GTU | fA * mU fU * mG * fG * mG * fA * mG * T * mU | X | |
| WV- | GUCCAGCUUUAUUGGGA | MeOT * fG * mU fC * mC fA * mG fC * mU fU * | XXOXOXOXOXOXOXXXXXX | 476 |
| 3817 | GTU | mU fA * mU fU * mG * fG * mG * fA * mG * T * | X | |
| | | mU | | |
| WV- | GUCCAGCUUUAUUGGGA | IT * fG * mU fC * mC fA * mG fC * mU fU * mU | XXOXOXOXOXOXOXXXXXX | 477 |
| 3818 | GTU | fA * mU fU * mG * fG * mG * fA * mG * T * mU | X | |
| WV- | GUCCAGCUUUAUUGGGA | POIT * fG * mU fC * mC fA * mG fC * mU fU * | XXOXOXOXOXOXOXXXXXX | 478 |
| 3819 | GTU | mU fA * mU fU * mG * fG * mG * fA * mG * T * | | |
| | | mU | | |
| WV- | TGUCCAGCUUUAUUGGGA | PHT * fG * mU fC * mC fA * mG fC * mU fU * mU | XXOXOXOXOXOXOXXXXXX | 479 |
| 3880 | GTU | fA * mU fU * mG * fG * mG * fA * mG * AMC6T * | X | |
| | | mU | | |
| WV- | TGTCCAGCTTTATTGGGAG | Mod001L001Teo * Geo * Teo * m5Ceo * m5Ceo | OXXXXXXXXXXXXXXXXXXX | 480 |
| 3967 | G | * A * G * C * T * T * T * A * T * T * G * Geo * Geo | | |
| | | * Aeo * Geo * Geo | | |
| WV- | AGCTTCTTGTCCAGCTTTAT | Mod001L001Aeo * Geo * m5Ceo * Teo * Teo * C | OXXXXXXXXXXXXXXXXXXX | 481 |
| 3968 | | * T * T * G * T * C * C * A * G * C * Teo * Teo * | | |
| | | Teo * Aeo * Teo | | |
| WV- | TGTCCAGCTTTATTGGGAG | L001Teo * Geo * Teo * m5Ceo * m5Ceo * A * G | OXXXXXXXXXXXXXXXXXXX | 482 |
| 3972 | G | * C * T * T * T * A * T * T * G * Geo * Geo * Aeo | | |
| | | * Geo * Geo | | |
| WV- | AGCTTCTTGTCCAGCTTTAT | L001Aeo * Geo * m5Ceo * Teo * Teo * C * T * T * | OXXXXXXXXXXXXXXXXXXX | 483 |
| 3973 | | G * T * C * C * A * G * C * Teo * Teo * Teo * Aeo | | |
| | | * Teo | | |
| WV- | AGCUUCTTGTCCAGCUUU | L001mA * mG * mC * mU * mU * C * T * T * G * | OXXXXXXXXXXXXXXXXXXX | 484 |
| 3974 | AU | T * C * C * A * G * C * mU * mU * mU * mA * mU | | |
| WV- | GCAUCCTTGGCGGTCUUG | Mod001L001mG * mC * mA * mU * mC * C * T * | OXXXXXXXXXXXXXXXXXXX | 485 |
| 4125 | GU | T * G * G * C * G * G * T * C * mU * mU * mG * | | |
| | | mG * mU | | |
| WV- | UGCUCAGTGCATCCTUGGC | Mod001L001mU * mG * mC * mU * mC * A * G | OXXXXXXXXXXXXXXXXXXX | 486 |
| 4126 | G | * T * G * C * A * T * C * C * T * mU * mG * mG * | | |
| | | mC * mG | | |
| WV- | CCUGGGACTCCTGCACGCU | Mod001L001mC * mC * mU * mG * mG * G * A * | OXXXXXXXXXXXXXXXXXXX | 487 |
| 4127 | G | C * T * C * C * T * G * C * A * mC * mG * mC * | | |
| | | mU * mG | | |
| WV- | CUGCUGGGCCACCTGGGA | Mod001L001mC * mU * mG * mC * mU * G * G | OXXXXXXXXXXXXXXXXXXX | 488 |
| 4128 | CU | * G * C * C * A * C * C * T * G * mG * mG * mA * | | |
| | | mC * mU | | |
| WV- | GCCAUCGGTCACCCAGCCC | Mod001L001mG * mC * mC * mA * mU * C * G * | OXXXXXXXXXXXXXXXXXXX | 489 |
| 4129 | C | G * T * C * A * C * C * C * A * mG * mC * mC * | | |
| | | mC * mC | | |
| WV- | UGAAGCCATCGGTCACCCA | Mod001L001mU * mG * mA * mA * mG * C * C * | OXXXXXXXXXXXXXXXXXXX | 490 |
| 4130 | G | A * T * C * G * G * T * C * A * mC * mC * mC * | | |
| | | mA * mG | | |
| WV- | CUUGUCCTTAACGGTGCUC | Mod001L001mC * mU * mU * mG * mU * C * C * | OXXXXXXXXXXXXXXXXXXX | 491 |
| 4131 | C | T * T * A * A * C * G * G * T * mG * mC * mU * | | |
| | | mC * mC | | |
| WV- | AGGUCTCAGGCAGCCACG | Mod001L001mA * mG * mG * mU * mC * T * C * | OXXXXXXXXXXXXXXXXXXX | 492 |
| 4132 | GC | A * G * G * C * A * G * C * C * mA * mC * mG * | | |
| | | mG * mC | | |
| WV- | UGAGGTCTCAGGCAGCCAC | Mod001L001mU * mG * mA * mG * mG * T * C * | OXXXXXXXXXXXXXXXXXXX | 493 |
| 4133 | G | T * C * A * G * G * C * A * G * mC * mC * mA * | | |
| | | mC * mG | | |
| WV- | CCUGGAGATTGCAGGACCC | Mod001L001mC * mC * mU * mG * mG * A * G * | OXXXXXXXXXXXXXXXXXXX | 494 |
| 4134 | A | A * T * T * G * C * A * G * G * mA * mC * mC * | | |
| | | mC * mA | | |
| WV- | UCCAGCTTTATTGGGAGGC | Mod001L001mU * mC * mC * mA * mG * C * T * | OXXXXXXXXXXXXXXXXXXX | 495 |
| 4135 | C | T * T * A * T * T * G * G * G * mA * mG * mG * | | |
| | | mC * mC | | |
| WV- | CUUGUCCAGCTTTATUGG | Mod001L001mC * mU * mU * mG * mU * C * C * | OXXXXXXXXXXXXXXXXXXX | 496 |
| 4136 | GA | A * G * C * T * T * T * A * T * mU * mG * mG * | | |
| | | mG * mA | | |
| WV- | AGCTTCTTGTCCAGCTTTAT | Aeo * Geo * m5Ceo * Teo * Teo * m5C * T * T * | XXXXXXXXXXXXXXXXXXX | 497 |
| 4137 | | G * T * m5C * m5C * A * G * m5C * Teo * Teo * | | |
| | | Teo * Aeo * Teo | | |
| WV- | TCCAGCUUUAUUGGGAGG | T * fC * mC fA * mG fC * mU fU * mU fA * mU fU | XXOXOXOXOXOXOXXXXXX | 498 |
| 4139 | CTU | * mG fG * mG * fA * mG * fG * mC * T * mU | X | |
| WV- | TCCCUGGAGAUUGCAGGA | T * fC * mC fC * mU fG * mG fA * mG fA * mU fU | XXOXOXOXOXOXOXXXXXX | 499 |
| 4140 | CTU | * mG fC * mA * fG * mG * fA * mC * T * mU | X | |
| WV- | TCUGGAGAUUGCAGGACC | T * fC * mU fG * mG fA * mG fA * mU fU * mG fC | XXOXOXOXOXOXOXXXXXX | 500 |
| 4141 | CTU | * mA fG * mG * fA * mC * fC * mC * T * mU | X | |
| WV- | TGAGGUCUCAGGCAGCCA | T * fG * mA fG * mG fU * mC fU * mC fA * mG fG | XXOXOXOXOXOXOXXXXXX | 501 |
| 4142 | CTU | * mC fA * mG * fC * mC * fA * mC * T * mU | X | |
| WV- | TAGGUCUCAGGCAGCCAC | T * fA * mG fG * mU fC * mU fC * mA fG * mG fC | XXOXOXOXOXOXOXXXXXX | 502 |
| 4143 | GTU | * mA fG * mC * fC * mA * fC * mG * T * mU | X | |
| WV- | TGGUCUCAGGCAGCCACG | T * fG * mG fU * mC fU * mC fA * mG fG * mC fA | XXOXOXOXOXOXOXXXXXX | 503 |
| 4144 | GTU | * mG fC * mC * fA * mC * fG * mG * T * mU | X | |
| WV- | TUCUCAGGCAGCCACGGC | T * fU * mC fU * mC fA * mG fG * mC fA * mG fC | XXOXOXOXOXOXOXXXXXX | 504 |
| 4145 | UTU | * mC fA * mC * fG * mG * fC * mU * T * mU | X | |
| WV- | TCCAUCGGUCACCCAGCCC | T * fC * mC fA * mU fC * mG fG * mU fC * mA fC | XXOXOXOXOXOXOXXXXXX | 505 |
| 4146 | TU | * mC fC * mA * fG * mC * fC * mC * T * mU | X | |
| WV- | TCUGGGACUCCUGCACGC | T * fC * mU fG * mG fG * mA fC * mU fC * mC fU | XXOXOXOXOXOXOXXXXXX | 506 |
| 4147 | UTU | * mG fC * mA * fC * mG * fC * mU * T * mU | X | |
| WV- | TGCUCAGUGCAUCCUUGG | T * fG * mC fU * mC fA * mG fU * mG fC * mA fU | XXOXOXOXOXOXOXXXXXX | 507 |
| 4148 | CTU | * mC fC * mU * fU * mG * fG * mC * T * mU | X | |
| WV- | TGCAUCCUUGGCGGUCUU | T * fG * mC fA * mU fC * mC fU * mU fG * mG fC | XXOXOXOXOXOXOXXXXXX | 508 |
| 4149 | GTU | * mG fG * mU * fC * mU * fU * mG * T * mU | X | |
| WV- | TCCAGCUUUAUUGGGAGG | POT * fC * mC fA * mG fC * mU fU * mU fA * mU | XXOXOXOXOXOXOXXXXXX | 509 |
| 4150 | CTU | fU * mG fG * mG * fA * mG * fG * mC * T * mU | X | |
| WV- | TCCCUGGAGAUUGCAGGA | POT * fC * mC fC * mU fG * mG fA * mG fA * mU | XXOXOXOXOXOXOXXXXXX | 510 |
| 4151 | CTU | fU * mG fC * mA * fG * mG * fA * mC * T * mU | X | |
| WV- | TCUGGAGAUUGCAGGACC | POT * fC * mU fG * mG fA * mG fA * mU fU * mG | XXOXOXOXOXOXOXXXXXX | 511 |
| 4152 | CTU | fC * mA fG * mG * fA * mC * fC * mC * T * mU | X | |
| WV- | TGAGGUCUCAGGCAGCCA | POT * fG * mA fG * mG fU * mC fU * mC fA * mG | XXOXOXOXOXOXOXXXXXX | 512 |
| 4153 | CTU | fG * mC fA * mG * fC * mC * fA * mC * T * mU | X | |
| WV- | TAGGUCUCAGGCAGCCAC | POT * fA * mG fG * mU fC * mU fC * mA fG * mG | XXOXOXOXOXOXOXXXXXX | 513 |
| 4154 | GTU | fC * mA fG * mC * fC * mA * fC * mG * T * mU | X | |
| WV- | TGGUCUCAGGCAGCCACG | POT * fG * mG fU * mC fU * mC fA * mG fG * mC | XXOXOXOXOXOXOXXXXXX | 514 |
| 4155 | GTU | fA * mG fC * mC * fA * mC * fG * mG * T * mU | X | |
| WV- | TUCUCAGGCAGCCACGGC | POT * fU * mC fU * mC fA * mG fG * mC fA * mG | XXOXOXOXOXOXOXXXXXX | 515 |
| 4156 | UTU | fC * mC fA * mC * fG * mG * fC * mU * T * mU | X | |
| WV- | TCCAUCGGUCACCCAGCCC | POT * fC * mC fA * mU fC * mG fG * mU fC * mA | XXOXOXOXOXOXOXXXXXX | 516 |
| 4157 | TU | fC * mC fC * mA * fG * mC * fC * mC * T * mU | X | |
| WV- | TCUGGGACUCCUGCACGC | POT * fC * mU fG * mG fG * mA fC * mU fC * mC | XXOXOXOXOXOXOXXXXXX | 517 |
| 4158 | UTU | fU * mG fC * mA * fC * mG * fC * mU * T * mU | X | |
| WV- | TGCUCAGUGCAUCCUUGG | POT * fG * mC fU * mC fA * mG fU * mG fC * mA | XXOXOXOXOXOXOXXXXXX | 518 |
| 4159 | CTU | fU * mC fC * mU * fU * mG * fG * mC * T * mU | X | |
| WV- | TGCAUCCUUGGCGGUCUU | POT * fG * mC fA * mU fC * mC fU * mU fG * mG | XXOXOXOXOXOXOXXXXXX | 519 |
| 4160 | GTU | fC * mG fG * mU * fC * mU * fU * mG * T * mU | X | |
| WV- | TGUCCAGCUUUAUUGGGA | T * fG * mU fC * mC fA * mG fC * mU fU * mU fA | XXOXOXOXOXOXOXOOOO | 520 |
| 4161 | GTU | * mU fU * mG fGmG fAmG * T * mU | XX | |
| WV- | TCCAGCUUUAUUGGGAGG | T * fC * mC fA * mG fC * mU fU * mU fA * mU fU | XXOXOXOXOXOXOXOOOO | 521 |
| 4162 | CTU | * mG fG * mG fAmG fGmC * T * mU | XX | |
| WV- | TCCCUGGAGAUUGCAGGA | T * fC * mC fC * mU fG * mG fA * mG fA * mU fU | XXOXOXOXOXOXOXOOOO | 522 |
| 4163 | CTU | * mG fC * mA fGmG fAmC * T * mU | XX | |
| WV- | TCUGGAGAUUGCAGGACC | T * fC * mU fG * mG fA * mG fA * mU fU * mG fC | XXOXOXOXOXOXOXOOOO | 523 |
| 4164 | CTU | * mA fG * mG fAmC fCmC * T * mU | XX | |
| WV- | TGAGGUCUCAGGCAGCCA | T * fG * mA fG * mG fU * mC fU * mC fA * mG fG | XXOXOXOXOXOXOXOOOO | 524 |
| 4165 | CTU | * mC fA * mG fCmC fAmC * T * mU | XX | |
| WV- | TAGGUCUCAGGCAGCCAC | T * fA * mG fG * mU fC * mU fC * mA fG * mG fC | XXOXOXOXOXOXOXOOOO | 525 |
| 4166 | GTU | * mA fG * mC fCmA fCmG * T * mU | XX | |
| WV- | TGGUCUCAGGCAGCCACG | T * fG * mG fU * mC fU * mC fA * mG fG * mC fA | XXOXOXOXOXOXOXOOOO | 526 |
| 4167 | GTU | * mG fC * mC fAmC fGmG * T * mU | XX | |
| WV- | TUCUCAGGCAGCCACGGC | T * fU * mC fU * mC fA * mG fG * mC fA * mG fC | XXOXOXOXOXOXOXOOOO | 527 |
| 4168 | UTU | * mC fA * mC fGmG fCmU * T * mU | XX | |
| WV- | TCCAUCGGUCACCCAGCCC | T * fC * mC fA * mU fC * mG fG * mU fC * mA fC | XXOXOXOXOXOXOXOOOO | 528 |
| 4169 | TU | * mC fC * mA fGmC fCmC * T * mU | XX | |
| WV- | TCUGGGACUCCUGCACGC | T * fC * mU fG * mG fG * mA fC * mU fC * mC fU | XXOXOXOXOXOXOXOOOO | 529 |
| 4170 | UTU | * mG fC * mA fCmG fCmU * T * mU | XX | |
| WV- | TGCUCAGUGCAUCCUUGG | T * fG * mC fU * mC fA * mG fU * mG fC * mA fU | XXOXOXOXOXOXOXOOOO | 530 |
| 4171 | CTU | * mC fC * mU fUmG fGmC * T * mU | XX | |
| WV- | TGCAUCCUUGGCGGUCUU | T * fG * mC fA * mU fC * mC fU * mU fG * mG fC | XXOXOXOXOXOXOXOOOO | 531 |
| 4172 | GTU | * mG fG * mU fCmU fUmG * T * mU | XX | |
| WV- | TCCAGCUUUAUUGGGAGG | POT * fC * mC fA * mG fC * mU fU * mU fA * mU | XXOXOXOXOXOXOXOOOO | 532 |
| 4173 | CTU | fU * mG fG * mG fAmG fGmC * T * mU | XX | |
| WV- | TCCCUGGAGAUUGCAGGA | POT * fC * mC fC * mU fG * mG fA * mG fA * mU | XXOXOXOXOXOXOXOOOO | 533 |
| 4174 | CTU | fU * mG fC * mA fGmG fAmC * T * mU | XX | |
| WV- | TCUGGAGAUUGCAGGACC | POT * fC * mU fG * mG fA * mG fA * mU fU * mG | XXOXOXOXOXOXOXOOOO | 534 |
| 4175 | CTU | fC * mA fG * mG fAmC fCmC * T * mU | XX | |
| WV- | TGAGGUCUCAGGCAGCCA | POT * fG * mA fG * mG fU * mC fU * mC fA * mG | XXOXOXOXOXOXOXOOOO | 535 |
| 4176 | CTU | fG * mC fA * mG fCmC fAmC * T * mU | XX | |
| WV- | TAGGUCUCAGGCAGCCAC | POT * fA * mG fG * mU fC * mU fC * mA fG * mG | XXOXOXOXOXOXOXOOOO | 536 |
| 4177 | GTU | fC * mA fG * mC fCmA fCmG * T * mU | XX | |
| WV- | TUCUCAGGCAGCCACGGC | POT * fU * mC fU * mC fA * mG fG * mC fA * mG | XXOXOXOXOXOXOXOOOO | 537 |
| 4178 | UTU | fC * mC fA * mC fGmG fCmU * T * mU | XX | |
| WV- | TCCAUCGGUCACCCAGCCC | POT * fC * mC fA * mU fC * mG fG * mU fC * mA | XXOXOXOXOXOXOXOOOO | 538 |
| 4179 | TU | fC * mC fC * mA fGmC fCmC * T * mU | XX | |
| WV- | TCUGGGACUCCUGCACGC | POT * fC * mU fG * mG fG * mA fC * mU fC * mC | XXOXOXOXOXOXOXOOOO | 539 |
| 4180 | UTU | fU * mG fC * mA fCmG fCmU * T * mU | XX | |
| WV- | TGCUCAGUGCAUCCUUGG | POT * fG * mC fU * mC fA * mG fU * mG fC * mA | XXOXOXOXOXOXOXOOOO | 540 |
| 4181 | CTU | fU * mC fC * mU fUmG fGmC * T * mU | XX | |
| WV- | TGCAUCCUUGGCGGUCUU | POT * fG * mC fA * mU fC * mC fU * mU fG * mG | XXOXOXOXOXOXOXOOOO | 541 |
| 4182 | GTU | fC * mG fG * mU fCmU fUmG * T * mU | XX | |
| WV- | TCACTGAGAATACTGTCCC | POTeo * fC * mA fC * mT fG * mA fG * mA fA * | XXOXOXOXOXOXOXXXXXX | 542 |
| 4183 | AA | mT fA * mC fT * mG * fT * mC * fC * mC * Aeo * | X | |
| | | Aeo | | |
| WV- | TCACTGAGAATACTGTCCC | Teo * fC * mA fC * mT fG * mA fG * mA fA * mT | XXOXOXOXOXOXOXXXXXX | 543 |
| 4184 | AA | fA * mC fT * mG * fT * mC * fC * mC * Aeo * Aeo | X | |
| WV- | TCACUGAGAAUACUGUCC | POT * fC * mA fC * mU fG * mA fG * mA fA * mU | XXOXOXOXOXOXOXXXXXX | 544 |
| 4185 | CTU | fA * mC fU * mG * fU * mC * fC * mC * T * mU | X | |
| WV- | TCACUGAGAAUACUGUCC | T * fC * mA fC * mU fG * mA fG * mA fA * mU fA | XXOXOXOXOXOXOXXXXXX | 545 |
| 4186 | CTU | * mC fU * mG * fU * mC * fC * mC * T * mU | X | |
| WV- | TCACUGAGAAUACUGUCC | VPT * fC * mA fC * mU fG * mA fG * mA fA * mU | XXOXOXOXOXOXOXXXXXX | 546 |
| 4187 | CTU | fA * mC fU * mG * fU * mC * fC * mC * T * mU | X | |
| WV- | TCACUGAGAAUACUGUCC | POT * fC * mA fC * mU fG * mA fG * mA fA * mU | XXOXOXOXOXOXOXOOOO | 547 |
| 4188 | CTU | fA * mC fU * mG fUmC fCmC * T * mU | XX | |
| WV- | TCACUGAGAAUACUGUCC | T * fC * mA fC * mU fG * mA fG * mA fA * mU fA | XXOXOXOXOXOXOXOOOO | 548 |
| 4189 | CTU | * mC fU * mG fUmC fCmC * T * mU | XX | |
| WV- | TCACUGAGAAUACUGUCC | VPT * fC * mA fC * mU fG * mA fG * mA fA * mU | XXOXOXOXOXOXOXOOOO | 549 |
| 4190 | CTU | fA * mC fU * mG fUmC fCmC * T * mU | XX | |
| WV- | GCAUCCTTGGCGGTCUUG | L001mG * mC * mA * mU * mC * C * T * T * G * | OXXXXXXXXXXXXXXXXXXX | 550 |
| 4192 | GU | G * C * G * G * T * C * mU * mU * mG * mG * | | |
| | | mU | | |
| WV- | UGCUCAGTGCATCCTUGGC | L001mU * mG * mC * mU * mC * A * G * T * G * | OXXXXXXXXXXXXXXXXXXX | 551 |
| 4193 | G | C * A * T * C * C * T * mU * mG * mG * mC * mG | | |
| WV- | CCUGGGACTCCTGCACGCU | L001mC * mC * mU * mG * mG * G * A * C * T * | OXXXXXXXXXXXXXXXXXXX | 552 |
| 4194 | G | C * C * T * G * C * A * mC * mG * mC * mU * mG | | |
| WV- | CUGCUGGGCCACCTGGGA | L001mC * mU * mG * mC * mU * G * G * G * C * | OXXXXXXXXXXXXXXXXXXX | 553 |
| 4195 | CU | C * A * C * C * T * G * mG * mG * mA * mC * mU | | |
| WV- | GCCAUCGGTCACCCAGCCC | L001mG * mC * mC * mA * mU * C * G * G * T * | OXXXXXXXXXXXXXXXXXXX | 554 |
| 4196 | C | C * A * C * C * C * A * mG * mC * mC * mC * mC | | |
| WV- | UGAAGCCATCGGTCACCCA | L001mU * mG * mA * mA * mG * C * C * A * T * | OXXXXXXXXXXXXXXXXXXX | 555 |
| 4197 | G | C * G * G * T * C * A * mC * mC * mC * mA * mG | | |
| WV- | CUUGUCCTTAACGGTGCUC | L001mC * mU * mU * mG * mU * C * C * T * T * | OXXXXXXXXXXXXXXXXXXX | 556 |
| 4198 | C | A * A * C * G * G * T * mG * mC * mU * mC * mC | | |
| WV- | AGGUCTCAGGCAGCCACG | L001mA * mG * mG * mU * mC * T * C * A * G * | OXXXXXXXXXXXXXXXXXXX | 557 |
| 4199 | GC | G * C * A * G * C * C * mA * mC * mG * mG * mC | | |
| WV- | UGAGGTCTCAGGCAGCCAC | L001mU * mG * mA * mG * mG * T * C * T * C * | OXXXXXXXXXXXXXXXXXXX | 558 |
| 4200 | G | A * G * G * C * A * G * mC * mC * mA * mC * mG | | |
| WV- | CCUGGAGATTGCAGGACCC | L001mC * mC * mU * mG * mG * A * G * A * T * | OXXXXXXXXXXXXXXXXXXX | 559 |
| 4201 | A | T * G * C * A * G * G * mA * mC * mC * mC * mA | | |
| WV- | UCCAGCTTTATTGGGAGGC | L001mU * mC * mC * mA * mG * C * T * T * T * | OXXXXXXXXXXXXXXXXXXX | 560 |
| 4202 | C | A * T * T * G * G * G * mA * mG * mG * mC * mC | | |
| WV- | CUUGUCCAGCTTTATUGG | L001mC * mU * mU * mG * mU * C * C * A * G * | OXXXXXXXXXXXXXXXXXXX | 561 |
| 4203 | GA | C * T * T * T * A * T * mU * mG * mG * mG * mA | | |
| WV- | GCAUCCTTGGCGGTCUUG | Mod001L001mG * mCmAmUmC * C * T * T * G * | OXOOOXXXXXXXXXXXOOO | 562 |
| 4204 | GU | G * C * G * G * T * C * mUmUmGmG * mU | X | |
| WV- | UGCUCAGTGCATCCTUGGC | Mod001L001mU * mGmCmUmC * A * G * T * G | OXOOOXXXXXXXXXXXOOO | 563 |
| 4205 | G | * C * A * T * C * C * T * mUmGmGmC * mG | X | |
| WV- | CCUGGGACTCCTGCACGCU | Mod001L001mC * mCmUmGmG * G * A * C * T | OXOOOXXXXXXXXXXXOOO | 564 |
| 4206 | G | * C * C * T * G * C * A * mCmGmCmU * mG | X | |
| WV- | CUGCUGGGCCACCTGGGA | Mod001L001mC * mUmGmCmU * G * G * G * C | OXOOOXXXXXXXXXXXOOO | 565 |
| 4207 | CU | * C * A * C * C * T * G * mGmGmAmC * mU | X | |
| WV- | GCCAUCGGTCACCCAGCCC | Mod001L001mG * mCmCmAmU * C * G * G * T | OXOOOXXXXXXXXXXXOOO | 566 |
| 4208 | C | * C * A * C * C * C * A * mGmCmCmC * mC | X | |
| WV- | UGAAGCCATCGGTCACCCA | Mod001L001mU * mGmAmAmG * C * C * A * T | OXOOOXXXXXXXXXXXOOO | 567 |
| 4209 | G | * C * G * G * T * C * A * mCmCmCmA * mG | X | |
| WV- | CUUGUCCTTAACGGTGCUC | Mod001L001mC * mUmUmGmU * C * C * T * T * | OXOOOXXXXXXXXXXXOOO | 568 |
| 4210 | C | A * A * C * G * G * T * mGmCmUmC * mC | X | |
| WV- | AGGUCTCAGGCAGCCACG | Mod001L001mA * mGmGmUmC * T * C * A * G | OXOOOXXXXXXXXXXXOOO | 569 |
| 4211 | GC | * G * C * A * G * C * C * mAmCmGmG * mC | X | |
| WV- | UGAGGTCTCAGGCAGCCAC | Mod001L001mU * mGmAmGmG * T * C * T * C | OXOOOXXXXXXXXXXXOOO | 570 |
| 4212 | G | * A * G * G * C * A * G * mCmCmAmC * mG | X | |
| WV- | CCUGGAGATTGCAGGACCC | Mod001L001mC * mCmUmGmG * A * G * A * T | OXOOOXXXXXXXXXXXOOO | 571 |
| 4213 | A | * T * G * C * A * G * G * mAmCmCmC * mA | X | |
| WV- | UCCAGCTTTATTGGGAGGC | Mod001L001mU * mCmCmAmG * C * T * T * T * | OXOOOXXXXXXXXXXXOOO | 572 |
| 4214 | C | A * T * T * G * G * G * mAmGmGmC * mC | X | |
| WV- | CUUGUCCAGCTTTATUGG | Mod001L001mC * mUmUmGmU * C * C * A * G | OXOOOXXXXXXXXXXXOOO | 573 |
| 4215 | GA | * C * T * T * T * A * T * mUmGmGmG * mA | X | |
| WV- | AUAGCAGCTTCTTGTCCAG | Mod001L001mA * mUmAmGmC * A * G * C * T | OXOOOXXXXXXXXXXXOOO | 574 |
| 4216 | C | * T * C * T * T * G * T * mCmCmAmG * mC | X | |
| WV- | AUAGCAGCTTCTTGTCCAG | Mod001L001mA * mU * mA * mG * mC * A * G * | OXXXXXXXXXXXXXXXXXXX | 575 |
| 4217 | C | C * T * T * C * T * T * G * T * mC * mC * mA * | | |
| | | mG * mC | | |
| WV- | CACCAAGACCGC | rC rA rC rC rA rA rG rA rC rC rG rC rC rA rA rG rG | OOOOOOOOOOOOOO | 576 |
| 4218 | CAAGGATGCACTGAGCAG | rA rT rG rC rA rC rT rG rA rG rC rA rG | OOOOOOOOOOOOOOO | |
| WV- | GCACUGAGCAGC | rG rC rA rC rU rG rA rG rC rA rG rC rG rU rG rC rA | OOOOOOOOOOOOOO | 577 |
| 4219 | GUGCAGGAGUCCCAGGU | rG rG rA rG rU rC rC rC rA rG rG rU | OOOOOOOOOOOOOO | |
| WV- | GCAGGAGUCCCA | rG rC rA rG rG rA rG rU rC rC rC rA rG rG rU rG rG | OOOOOOOOOOOOOO | 578 |
| 4220 | GGUGGCCCAGCAGG | rC rC rC rA rG rC rA rG rG | OOOOOOOOOOO | |
| WV- | GGCCAGGGGCUG | rG rG rC rC rA rG rG rG rG rC rU rG rG rG rU rG | OOOOOOOOOOOOOO | 579 |
| 4221 | GGUGACCGAUGGCUUCAG | rA rC rC rG rA rU rG rG rC rU rU rC rA rG | OOOOOOOOOOOOOOO | |
| WV- | UGGAGCACCGUUAAGGAC | rU rG rG rA rG rC rA rC rC rG rU rU rA rA rG rG rA | OOOOOOOOOOOOOOOO | 580 |
| 4222 | AAGU | rC rA rA rG rU | OOOOO | |
| WV- | UCAGCCGUGGCUGCCUGA | rU rC rA rG rC rC rG rU rG rG rC rU rG rC rC rU rG | OOOOOOOOOOOOOO | 581 |
| 4223 | GACCUCAA | rA rG rA rC rC rU rC rA rA | OOOOOOOOOOO | |
| WV- | UUGGGUCCUGCAAUCUCC | rU rU rG rG rG rU rC rC rU rG rC rA rA rU rC rU rC | OOOOOOOOOOOOOO | 582 |
| 4224 | AGGGCU | rC rA rG rG rG rC rU | OOOOOOOOO | |
| WV- | UGGCCUCCCAA | rU rG rG rC rC rU rC rC rC rA rA rU rA rA rA rG rC | OOOOOOOOOOOOOO | 583 |
| 4225 | UAAAGCUGGACAAGAA | rU rG rG rA rC rA rA rG rA rA | OOOOOOOOOOOO | |
| WV- | AAUAAAGCUGG | rA rA rU rA rA rA rG rC rU rG rG rA rC rA rA rG rA | OOOOOOOOOOOOOO | 584 |
| 4226 | ACAAGAAGCUGCUAU | rA rG rC rU rG rC rU rA rU | OOOOOOOOOOO | |
| WV- | TGTCCAGCTTTATTGGGAG | Mod001L001Teo * Geo * Teo * m5Ceo * m5Ceo | OXXXXXXXXXXXXXXXXXXX | 585 |
| 4227 | G | * A * G * m5C * T * T * T * A * T * T * G * Geo * | | |
| | | Geo * Aeo * Geo * Geo | | |
| WV- | AGCTTCTTGTCCAGCTTTAT | Mod001L001Aeo * Geo * m5Ceo * Teo * Teo * | OXXXXXXXXXXXXXXXXXXX | 586 |
| 4228 | | m5C * T * T * G * T * m5C * m5C * A * G * m5C * | | |
| | | Teo * Teo * Teo * Aeo * Teo | | |
| WV- | TGTCCAGCTTTATTGGGAG | L001Teo * Geo * Teo * m5Ceo * m5Ceo * A * G | OXXXXXXXXXXXXXXXXXXX | 587 |
| 4229 | G | * m5C * T * T * T * A * T * T * G * Geo * Geo * | | |
| | | Aeo * Geo * Geo | | |
| WV- | AGCTTCTTGTCCAGCTTTAT | L001Aeo * Geo * m5Ceo * Teo * Teo * m5C * T * | OXXXXXXXXXXXXXXXXXXX | 588 |
| 4230 | | T * G * T * m5C * m5C * A * G * m5C * Teo * Teo | | |
| | | * Teo * Aeo * Teo | | |
| WV- | TGUCCAGCUUUAUUGGGA | POT * S fG * mU fC * mC fA * mG fC * mU fU * | SXOXOXOXOXOXOXOOOO | 589 |
| 4234 | GTU | mU fA * mU fU * mG fGmG fAmG * T * mU | XX | |
| WV- | TGUCCAGCUUUAUUGGGA | POT * R fG * mU fC * mC fA * mG fC * mU fU * | RXOXOXOXOXOXOXOOOO | 590 |
| 4235 | GTU | mU fA * mU fU * mG fGmG fAmG * T * mU | XX | |
| WV- | TGUCCAGCUUUAUUGGGA | POT fG * mU fC * mC fA * mG fC * mU fU * mU | OXOXOXOXOXOXOXOOOO | 591 |
| 4236 | GTU | fA * mU fU * mG fGmG fAmG * T * mU | XX | |
| WV- | TGUCCAGCUUUAUUGGGA | T * S fG * mU fC * mC fA * mG fC * mU fU * mU | SXOXOXOXOXOXOXOOOO | 592 |
| 4237 | GTU | fA * mU fU * mG fGmG fAmG * T * mU | XX | |
| WV- | TGUCCAGCUUUAUUGGGA | T * R fG * mU fC * mC fA * mG fC * mU fU * mU | RXOXOXOXOXOXOXOOOO | 593 |
| 4238 | GTU | fA * mU fU * mG fGmG fAmG * T * mU | XX | |
| WV- | TGUCCAGCUUUAUUGGGA | T fG * mU fC * mC fA * mG fC * mU fU * mU fA * | OXOXOXOXOXOXOXOOOO | 594 |
| 4239 | GTU | mU fU * mG fGmG fAmG * T * mU | XX | |
| WV- | CACCAAGACCG | rC rA rC rC rA rA rG rA rC rC rG rC rC rA rA rG rG | OOOOOOOOOOOOOO | 595 |
| 4240 | CCAAGGAUGCACUGAGCA | rA rU rG rC rA rC rU rG rA rG rC rA rG | OOOOOOOOOOOOOOO | |
| | | G | | |
| WV- | TCAUCCUUGGCGGUCUUG | T * fC * mA fU * mC fC * mU fU * mG fG * mC fG | XXOXOXOXOXOXOXXXXXX | 596 |
| 4245 | GTU | * mG fU * mC * fU * mU * fG * mG * T * mU | X | |
| WV- | TUGCUGGGCCACCUGGGA | T * fU * mG fC * mU fG * mG fG * mC fC * mA fC | XXOXOXOXOXOXOXXXXXX | 597 |
| 4246 | CTU | * mC fU * mG * fG * mG * fA * mC * T * mU | X | |
| WV- | TGAAGCCAUCGGUCACCCA | T * fG * mA fA * mG fC * mC fA * mU fC * mG fG | XXOXOXOXOXOXOXXXXXX | 598 |
| 4247 | TU | * mU fC * mA * fC * mC * fC * mA * T * mU | X | |
| WV- | TUUGUCCUUAACGGUGCU | T * fU * mU fG * mU fC * mC fU * mU fA * mA fC | XXOXOXOXOXOXOXXXXXX | 599 |
| 4248 | CTU | * mG fG * mU * fG * mC * fU * mC * T * mU | X | |
| WV- | TUUGUCCAGCUUUAUUGG | T * fU * mU fG * mU fC * mC fA * mG fC * mU fU | XXOXOXOXOXOXOXXXXXX | 600 |
| 4249 | GTU | * mU fA * mU * fU * mG * fG * mG * T * mU | X | |
| WV- | TCAUCCUUGGCGGUCUUG | POT * fC * mA fU * mC fC * mU fU * mG fG * mC | XXOXOXOXOXOXOXXXXXX | 601 |
| 4250 | GTU | fG * mG fU * mC * fU * mU * fG * mG * T * mU | X | |
| WV- | TUGCUGGGCCACCUGGGA | POT * fU * mG fC * mU fG * mG fG * mC fC * mA | XXOXOXOXOXOXOXXXXXX | 602 |
| 4251 | CTU | fC * mC fU * mG * fG * mG * fA * mC * T * mU | X | |
| WV- | TGAAGCCAUCGGUCACCCA | POT * fG * mA fA * mG fC * mC fA * mU fC * mG | XXOXOXOXOXOXOXXXXXX | 603 |
| 4252 | TU | fG * mU fC * mA * fC * mC * fC * mA * T * mU | X | |
| WV- | TUUGUCCUUAACGGUGCU | POT * fU * mU fG * mU fC * mC fU * mU fA * mA | XXOXOXOXOXOXOXXXXXX | 604 |
| 4253 | CTU | fC * mG fG * mU * fG * mC * fU * mC * T * mU | X | |
| WV- | TUUGUCCAGCUUUAUUGG | POT * fU * mU fG * mU fC * mC fA * mG fC * mU | XXOXOXOXOXOXOXXXXXX | 605 |
| 4254 | GTU | fU * mU fA * mU * fU * mG * fG * mG * T * mU | X | |
| WV- | TCAUCCUUGGCGGUCUUG | T * fC * mA fU * mC fC * mU fU * mG fG * mC fG | XXOXOXOXOXOXOXOOOO | 606 |
| 4255 | GTU | * mG fU * mC fUmU fGmG * T * mU | XX | |
| WV- | TUGCUGGGCCACCUGGGA | T * fU * mG fC * mU fG * mG fG * mC fC * mA fC | XXOXOXOXOXOXOXOOOO | 607 |
| 4256 | CTU | * mC fU * mG fGmG fAmC * T * mU | XX | |
| WV- | TGAAGCCAUCGGUCACCCA | T * fG * mA fA * mG fC * mC fA * mU fC * mG fG | XXOXOXOXOXOXOXOOOO | 608 |
| 4257 | TU | * mU fC * mA fCmC fCmA * T * mU | XX | |
| WV- | TUUGUCCUUAACGGUGCU | T * fU * mU fG * mU fC * mC fU * mU fA * mA fC | XXOXOXOXOXOXOXOOOO | 609 |
| 4258 | CTU | * mG fG * mU fGmCfUmC * T * mU | XX | |
| WV- | TUUGUCCAGCUUUAUUGG | T * fU * mU fG * mU fC * mC fA * mG fC * mU fU | XXOXOXOXOXOXOXOOOO | 610 |
| 4259 | GTU | * mU fA * mU fUmG fGmG * T * mU | XX | |
| WV- | TCAUCCUUGGCGGUCUUG | POT * fC * mA fU * mC fC * mU fU * mG fG * mC | XXOXOXOXOXOXOXOOOO | 611 |
| 4260 | GTU | fG * mG fU * mC fUmU fGmG * T * mU | XX | |
| WV- | TUGCUGGGCCACCUGGGA | POT * fU * mG fC * mU fG * mG fG * mC fC * mA | XXOXOXOXOXOXOXOOOO | 612 |
| 4261 | CTU | fC * mC fU * mG fGmG fAmC * T * mU | XX | |
| WV- | TGAAGCCAUCGGUCACCCA | POT * fG * mA fA * mG fC * mC fA * mU fC * mG | XXOXOXOXOXOXOXOOOO | 613 |
| 4262 | TU | fG * mU fC * mA fCmC fCmA * T * mU | XX | |
| WV- | TUUGUCCUUAACGGUGCU | POT * fU * mU fG * mU fC * mC fU * mU fA * mA | XXOXOXOXOXOXOXOOOO | 614 |
| 4263 | CTU | fC * mG fG * mU fGmC fUmC * T * mU | XX | |
| WV- | TGUCCAGCUUUAUUGGGA | T * S fG * mU fC * mC fA * mG fC * mU fU * mU | SXOXOXOXOXOXOXXXXXX | 615 |
| 5288 | GTU | fA * mU fU * mG * fG * mG * fA * mG * T * SmU | S | |
| WV- | TAGCUUCUUGUCCAGCUU | T * S fA * mG fC * mU fU * mC fU * mU fG * mU | SXOXOXOXOXOXOXXXXXX | 616 |
| 5289 | UTU | fC * mC fA * mG * fC * mU * fU * mU * T * SmU | S | |
| WV- | TGUCCAGCUUUAUUGGGA | T * S fG * mU fC * mC fA * mG fC * mU fU * mU | SXOXOXOXOXOXOXXXXXX | 617 |
| 5290 | GGCTU | fA * mU fU * mG * fG * mG * fA * mG * fG * mC | XXS | |
| | | * T * SmU | | |
| WV- | TAGCUUCUUGUCCAGCUU | T * S fA * mG fC * mU fU * mC fU * mU fG * mU | SXOXOXOXOXOXOXXXXXX | 618 |
| 5291 | UAUTU | fC * mC fA * mG * fC * mU * fU * mU * fA * mU | XXS | |
| | | * T * SmU | | |
| WV- | TGUCCAGCUUUAUUGGGA | T * fG * mU fC * mC fA * mG fC * mU fU * mU fA | XXOXOXOXOXOXOXXXXXX | 619 |
| 5292 | GTU | * mU fU * mG * fG * mG * fA * mG * T * SmU | S | |
| WV- | TAGCUUCUUGUCCAGCUU | T * fA * mG fC * mU fU * mC fU * mU fG * mU fC | XXOXOXOXOXOXOXXXXXX | 620 |
| 5293 | UTU | * mC fA * mG * fC * mU * fU * mU * T * SmU | S | |
| WV- | TGUCCAGCUUUAUUGGGA | T * fG * mU fC * mC fA * mG fC * mU fU * mU fA | XXOXOXOXOXOXOXXXXXX | 621 |
| 5294 | GGCTU | * mU fU * mG * fG * mG * fA * mG * fG * mC * T | XXS | |
| | | * SmU | | |
| WV- | TAGCUUCUUGUCCAGCUU | T * fA * mG fC * mU fU * mC fU * mU fG * mU fC | XXOXOXOXOXOXOXXXXXX | 622 |
| 5295 | UAUTU | * mC fA * mG * fC * mU * fU * mU * fA * mU * T | XXS | |
| | | * SmU | | |
| WV- | TGUCCAGCUUUAUUGGGA | T * S fG * mU fC * mC fA * mG fC * mU fU * mU | SXOXOXOXOXOXOXXXXXX | 623 |
| 5296 | GTU | fA * mU fU * mG * fG * mG * fA * mG * T * mU | X | |
| WV- | TAGCUUCUUGUCCAGCUU | T * S fA * mG fC * mU fU * mC fU * mU fG * mU | SXOXOXOXOXOXOXXXXXX | 624 |
| 5297 | UTU | fC * mC fA * mG * fC * mU * fU * mU * T * mU | X | |
| WV- | TGUCCAGCUUUAUUGGGA | T * S fG * mU fC * mC fA * mG fC * mU fU * mU | SXOXOXOXOXOXOXXXXXX | 625 |
| 5298 | GGCTU | fA * mU fU * mG * fG * mG * fA * mG * fG * mC | XXX | |
| | | * T * mU | | |
| WV- | TAGCUUCUUGUCCAGCUU | T * S fA * mG fC * mU fU * mC fU * mU fG * mU | SXOXOXOXOXOXOXXXXXX | 626 |
| 5299 | UAUTU | fC * mC fA * mG * fC * mU * fU * mU * fA * mU | XXX | |
| | | * T * mU | | |
| WV- | GUCCAGCUUUAUUGGGA | fG * mU fC * mC fA * mG fC * mU fU * mU fA * | XOXOXOXOXOXOXXXXXXX | 627 |
| 5300 | GTU | mU fU * mG * fG * mG * fA * mG * T * mU | | |
| WV- | AGCUUCUUGUCCAGCUUU | fA * mG fC * mU fU * mC fU * mU fG * mU fC * | XOXOXOXOXOXOXXXXXXX | 628 |
| 5301 | TU | mC fA * mG * fC * mU * fU * mU * T * mU | | |
| WV- | GCAUCCTTGGCGGTCUUG | L001mG * mCmAmUmC * C * T * T * G * G * C * | OXOOOXXXXXXXXXXXOOO | 629 |
| 5711 | GU | G * G * T * C * mUmUmGmG * mU | X | |
| WV- | UGCUCAGTGCATCCTUGGC | L001mU * mGmCmUmC * A * G * T * G * C * A * | OXOOOXXXXXXXXXXXOOO | 630 |
| 5712 | G | T * C * C * T * mUmGmGmC * mG | X | |
| WV- | CCUGGGACTCCTGCACGCU | L001mC * mCmUmGmG * G * A * C * T * C * C * | OXOOOXXXXXXXXXXXOOO | 631 |
| 5713 | G | T * G * C * A * mCmGmCmU * mG | X | |
| WV- | CUGCUGGGCCACCTGGGA | L001mC * mUmGmCmU * G * G * G * C * C * A * | OXOOOXXXXXXXXXXXOOO | 632 |
| 5714 | CU | C * C * T * G * mGmGmAmC * mU | X | |
| WV- | GCCAUCGGTCACCCAGCCC | L001mG * mCmCmAmU * C * G * G * T * C * A * | OXOOOXXXXXXXXXXXOOO | 633 |
| 5715 | C | C * C * C * A * mGmCmCmC * mC | X | |
| WV- | UGAAGCCATCGGTCACCCA | L001mU * mGmAmAmG * C * C * A * T * C * G * | OXOOOXXXXXXXXXXXOOO | 634 |
| 5716 | G | G * T * C * A * mCmCmCmA * mG | X | |
| WV- | CUUGUCCTTAACGGTGCUC | L001mC * mUmUmGmU * C * C * T * T * A * A * | OXOOOXXXXXXXXXXXOOO | 635 |
| 5717 | C | C * G * G * T * mGmCmUmC * mC | X | |
| WV- | AGGUCTCAGGCAGCCACG | L001mA * mGmGmUmC * T * C * A * G * G * C * | OXOOOXXXXXXXXXXXOOO | 636 |
| 5718 | GC | A * G * C * C * mAmCmGmG * mC | X | |
| WV- | UGAGGTCTCAGGCAGCCAC | L001mU * mGmAmGmG * T * C * T * C * A * G * | OXOOOXXXXXXXXXXXOOO | 637 |
| 5719 | G | G * C * A * G * mCmCmAmC * mG | X | |
| WV- | CCUGGAGATTGCAGGACCC | L001mC * mCmUmGmG * A * G * A * T * T * G * | OXOOOXXXXXXXXXXXOOO | 638 |
| 5720 | A | C * A * G * G * mAmCmCmC * mA | X | |
| WV- | UCCAGCTTTATTGGGAGGC | L001mU * mCmCmAmG * C * T * T * T * A * T * | OXOOOXXXXXXXXXXXOOO | 639 |
| 5721 | C | T * G * G * G * mAmGmGmC * mC | X | |
| WV- | CUUGUCCAGCTTTATUGG | L001mC * mUmUmGmU * C * C * A * G * C * T * | OXOOOXXXXXXXXXXXOOO | 640 |
| 5722 | GA | T * T * A * T * mUmGmGmG * mA | X | |
| WV- | AUAGCAGCTTCTTGTCCAG | L001mA * mUmAmGmC * A * G * C * T * T * C * | OXOOOXXXXXXXXXXXOOO | 641 |
| 5723 | C | T * T * G * T * mCmCmAmG * mC | X | |
| WV- | AUAGCAGCTTCTTGTCCAG | L001mA * mU * mA * mG * mC * A * G * C * T * | OXXXXXXXXXXXXXXXXXXX | 642 |
| 5724 | C | T * C * T * T * G * T * mC * mC * mA * mG * mC | | |
| WV- | AGCTTCTTGTCCAGCTTTAT | Mod001L001Aeo * RGeo * Rm5Ceo * RTeo * | ORRRRRSSSSSSRSSRRRRR | 643 |
| 6001 | | RTeo * RC * ST * ST * SG * ST * SC * SC * RA * SG | | |
| | | * SC * RTeo * RTeo * RTeo * RAeo * RTeo | | |
| WV- | AGCTTCTTGTCCAGCTTTAT | Mod001L001Aeo * RGeo * Rm5Ceo * RTeo * | ORRRRRSSSRSSSSSRRRRR | 644 |
| 6002 | | RTeo * RC * ST * ST * SG * RT * SC * SC * SA * SG | | |
| | | * SC * RTeo * RTeo * RTeo * RAeo * RTeo | | |
| WV- | AGCTTCTTGTCCAGCTTTAT | Mod001L001Aeo * RGeo * Rm5Ceo * RTeo * | ORRRRRSSSRSSRSSRRRRR | 645 |
| 6003 | | RTeo * RC * ST * ST * SG * RT * SC * SC * RA * SG | | |
| | | * SC * RTeo * RTeo * RTeo * RAeo * RTeo | | |
| WV- | AGCUTCTTGTCCAGCTUUA | Mod001L001mA * mGmCmUTeo * C * T * T * G | OXOOOXXXXXXXXXXXOOO | 646 |
| 6004 | U | * T * C * C * A * G * C * TeomUmUmA * mU | X | |
| WV- | AGCUTCTTGTCCAGCTUUA | Mod001L001mA * SmGmCmUTeo * RC * ST * ST | OSOOORSSSSSSRSSROOOS | 647 |
| 6005 | U | * SG * ST * SC * SC * RA * SG * SC * | | |
| | | RTeomUmUmA * SmU | | |
| WV- | AGCUTCTTGTCCAGCTUUA | Mod001L001mA * SmGmCmUTeo * RC * ST * ST | OSOOORSSSRSSSSSROOOS | 648 |
| 6006 | U | * SG * RT * SC * SC * SA * SG * SC * | | |
| | | RTeomUmUmA * SmU | | |
| WV- | AGCUTCTTGTCCAGCTUUA | Mod001L001mA * SmGmCmUTeo * RC * ST * ST | OSOOORSSSRSSRSSROOO | 649 |
| 6007 | U | * SG * RT * SC * SC * RA * SG * SC * | S | |
| | | RTeomUmUmA * SmU | | |
| WV- | UGUCCAGCTTTATTGGGAG | Mod001L001mU * mGmUmCm5Ceo * A * G * C | OXOOOXXXXXXXXXXXOOO | 650 |
| 6008 | G | * T * T * T * A * T * T * G * GeomGmAmG * mG | X | |
| WV- | UGUCCAGCTTTATTGGGAG | Mod001L001mU * SmGmUmCm5Ceo * RA * SG | OSOOORSSSSSRSSSROOOS | 651 |
| 6009 | G | * SC * ST * ST * ST * RA * ST * ST * SG * | | |
| | | RGeomGmAmG * SmG | | |
| WV- | AGCTTCTTGTCCAGCTTTAT | L001Aeo * RGeo * Rm5Ceo * RTeo * RTeo * RC * | ORRRRRSSSSSSRSSRRRRR | 652 |
| 6017 | | ST * ST * SG * ST * SC * SC * RA * SG * SC * RTeo | | |
| | | * RTeo * RTeo * RAeo * RTeo | | |
| WV- | AGCTTCTTGTCCAGCTTTAT | L001Aeo * RGeo * Rm5Ceo * RTeo * RTeo * RC * | ORRRRRSSSRSSSSSRRRRR | 653 |
| 6018 | | ST * ST * SG * RT * SC * SC * SA * SG * SC * RTeo | | |
| | | * RTeo * RTeo * RAeo * RTeo | | |
| WV- | AGCTTCTTGTCCAGCTTTAT | L001Aeo * RGeo * Rm5Ceo * RTeo * RTeo * RC * | ORRRRRSSSRSSRSSRRRRR | 654 |
| 6019 | | ST * ST * SG * RT * SC * SC * RA * SG * SC * RTeo | | |
| | | * RTeo * RTeo * RAeo * RTeo | | |
| WV- | AGCUTCTTGTCCAGCTUUA | L001mA * mGmCmUTeo * C * T * T * G * T * C * | OXOOOXXXXXXXXXXXOOO | 655 |
| 6020 | U | C * A * G * C * TeomUmUmA * mU | X | |
| WV- | AGCUTCTTGTCCAGCTUUA | L001mA * SmGmCmUTeo * RC * ST * ST * SG * | OSOOORSSSSSSRSSROOOS | 656 |
| 6021 | U | ST * SC * SC * RA * SG * SC * RTeomUmUmA * | | |
| | | SmU | | |
| WV- | AGCUTCTTGTCCAGCTUUA | L001mA * SmGmCmUTeo * RC * ST * ST * SG * | OSOOORSSSRSSSSSROOOS | 657 |
| 6022 | U | RT * SC * SC * SA * SG * SC * RTeomUmUmA * | | |
| | | SmU | | |
| WV- | AGCUTCTTGTCCAGCTUUA | L001mA * SmGmCmUTeo * RC * ST * ST * SG * | OSOOORSSSRSSRSSROOO | 658 |
| 6023 | U | RT * SC * SC * RA * SG * SC * RTeomUmUmA * | S | |
| | | SmU | | |
| WV- | UGUCCAGCTTTATTGGGAG | L001mU * mGmUmCm5Ceo * A * G * C * T * T * | OXOOOXXXXXXXXXXXOOO | 659 |
| 6024 | G | T * A * T * T * G * GeomGmAmG * mG | X | |
| WV- | UGUCCAGCTTTATTGGGAG | L001mU * SmGmUmCm5Ceo * RA * SG * SC * ST | OSOOORSSSSSRSSSROOOS | 660 |
| 6025 | G | * ST * ST * RA * ST * ST * SG * RGeomGmAmG * | | |
| | | SmG | | |
| WV- | AGCTTCTTGTCCAGCTTTAT | Aeo * RGeo * Rm5Ceo * RTeo * RTeo * RC * ST * | RRRRRSSSSSSRSSRRRRR | 661 |
| 6026 | | ST * SG * ST * SC * SC * RA * SG * SC * RTeo * | | |
| | | RTeo * RTeo * RAeo * RTeo | | |
| WV- | AGCTTCTTGTCCAGCTTTAT | Aeo * RGeo * Rm5Ceo * RTeo * RTeo * RC * ST * | RRRRRSSSRSSSSSRRRRR | 662 |
| 6027 | | ST * SG * RT * SC * SC * SA * SG * SC * RTeo * | | |
| | | RTeo * RTeo * RAeo * RTeo | | |
| WV- | AGCTTCTTGTCCAGCTTTAT | Aeo * RGeo * Rm5Ceo * RTeo * RTeo * RC * ST * | RRRRRSSSRSSRSSRRRRR | 663 |
| 6028 | | ST * SG * RT * SC * SC * RA * SG * SC * RTeo * | | |
| | | RTeo * RTeo * RAeo * RTeo | | |
| WV- | AGCUTCTTGTCCAGCTUUA | mA * mGmCmUTeo * C * T * T * G * T * C * C * A | XOOOXXXXXXXXXXXOOOX | 664 |
| 6029 | U | * G * C * TeomUmUmA * mU | | |
| WV- | AGCUTCTTGTCCAGCTUUA | mA * SmGmCmUTeo * RC * ST * ST * SG * ST | SOOORSSSSSSRSSROOOS | 665 |
| 6030 | U | SC * SC * RA * SG * SC * RTeomUmUmA * SmU | | |
| WV- | AGCUTCTTGTCCAGCTUUA | mA * SmGmCmUTeo * RC * ST * ST * SG * RT * | SOOORSSSRSSSSSROOOS | 666 |
| 6031 | U | SC * SC * SA * SG * SC * RTeomUmUmA * SmU | | |
| WV- | AGCUTCTTGTCCAGCTUUA | mA * SmGmCmUTeo * RC * ST * ST * SG * RT * | SOOORSSSRSSRSSROOOS | 667 |
| 6032 | U | SC * SC * RA * SG * SC * RTeomUmUmA * SmU | | |
| WV- | UGUCCAGCTTTATTGGGAG | mU * mGmUmCm5Ceo * A * G * C * T * T * T * A | XOOOXXXXXXXXXXXOOOX | 668 |
| 6033 | G | * T * T * G * GeomGmAmG * mG | | |
| WV- | UGUCCAGCTTTATTGGGAG | mU * SmGmUmCm5Ceo * RA * SG * SC * ST * ST | SOOORSSSSSRSSSROOOS | 669 |
| 6034 | G | * ST * RA * ST * ST * SG * RGeomGmAmG * SmG | | |
| WV- | TGUCCAGCUUUAUUGGGA | T * S fG * mU fC * mC fA * mG fC * mU fU * mU | SXOXOXOXOXOXOXXXXXX | 670 |
| 6035 | GTU | fA * mU fU * mG * fG * mG * fA * mG * | S | |
| | | TGaNC6T * SmU | | |
| WV- | TAGCUUCUUGUCCAGCUU | T * S fA * mG fC * mU fU * mC fU * mU fG * mU | SXOXOXOXOXOXOXXXXXX | 671 |
| 6036 | UTU | fC * mC fA * mG * fC * mU * fU * mU * TGaNC6T | S | |
| | | * SmU | | |
| WV- | TGUCCAGCUUUA | T * S fG * mU fC * mC fA * mG fC * mU fU * mU | SXOXOXOXOXOXOXXXXXX | 672 |
| 6037 | UUGGGAGGCTU | fA * mU fU * mG * fG * mG * fA * mG * fG * mC | XXS | |
| | | * TGaNC6T * SmU | | |
| WV- | TAGCUUCUUGU | T * S fA * mG fC * mU fU * mC fU * mU fG * mU | SXOXOXOXOXOXOXXXXXX | 673 |
| 6038 | CCAGCUUUAUTU | fC * mC fA * mG * fC * mU * fU * mU * fA * mU | XXS | |
| | | * TGaNC6T * SmU | | |
| WV- | TGUCCAGCUUUAUUGGGA | T * fG * mU fC * mC fA * mG fC * mU fU * mU fA | XXOXOXOXOXOXOXXXXXX | 674 |
| 6039 | GTU | * mU fU * mG * fG * mG * fA * mG * TGaNC6T * | S | |
| | | SmU | | |
| WV- | TAGCUUCUUGUCCAGCUU | T * fA * mG fC * mU fU * mC fU * mU fG * mU fC | XXOXOXOXOXOXOXXXXXX | 675 |
| 6040 | UTU | * mC fA * mG * fC * mU * fU * mU * TGaNC6T * | S | |
| | | SmU | | |
| WV- | TGUCCAGCUUUAUUGGGA | T * fG * mU fC * mC fA * mG fC * mU fU * mU fA | XXOXOXOXOXOXOXXXXXX | 676 |
| 6041 | GGCTU | * mU fU * mG * fG * mG * fA * mG * fG * mC * | XXS | |
| | | TGaNC6T * SmU | | |
| WV- | TAGCUUCUUGUCCAGCUU | T * fA * mG fC * mU fU * mC fU * mU fG * mU fC | XXOXOXOXOXOXOXXXXXX | 677 |
| 6042 | UAUTU | * mC fA * mG * fC * mU * fU * mU * fA * mU * | XXS | |
| | | TGaNC6T * SmU | | |
| WV- | TGUCCAGCUUUAUUGGGA | T * S fG * mU fC * mC fA * mG fC * mU fU * mU | SXOXOXOXOXOXOXXXXXX | 678 |
| 6043 | GTU | fA * mU fU * mG * fG * mG * fA * mG * AMC6T * | S | |
| | | SmU | | |
| WV- | TAGCUUCUUGUCCAGCUU | T * S fA * mG fC * mU fU * mC fU * mU fG * mU | SXOXOXOXOXOXOXXXXXX | 679 |
| 6044 | UTU | fC * mC fA * mG * fC * mU * fU * mU * AMC6T * | S | |
| | | SmU | | |
| WV- | TGUCCAGCUUUAUUGGGA | T * S fG * mU fC * mC fA * mG fC * mU fU * mU | SXOXOXOXOXOXOXXXXXX | 680 |
| 6045 | GGCTU | fA * mU fU * mG * fG * mG * fA * mG * fG * mC | XXS | |
| | | * AMC6T * SmU | | |
| WV- | TAGCUUCUUGUCCAGCUU | T * S fA * mG fC * mU fU * mC fU * mU fG * mU | SXOXOXOXOXOXOXXXXXX | 681 |
| 6046 | UAUTU | fC * mC fA * mG * fC * mU * fU * mU * fA * mU | XXS | |
| | | * AMC6T * SmU | | |
| WV- | TGUCCAGCUUUAUUGGGA | T * fG * mU fC * mC fA * mG fC * mU fU * mU fA | XXOXOXOXOXOXOXXXXXX | 682 |
| 6047 | GTU | * mU fU * mG * fG * mG * fA * mG * AMC6T * | S | |
| | | SmU | | |
| WV- | TAGCUUCUUGUCCAGCUU | T * fA * mG fC * mU fU * mC fU * mU fG * mU fC | XXOXOXOXOXOXOXXXXXX | 683 |
| 6048 | UTU | * mC fA * mG * fC * mU * fU * mU * AMC6T * | S | |
| | | SmU | | |
| WV- | TGUCCAGCUUUAUUGGGA | T * fG * mU fC * mC fA * mG fC * mU fU * mU fA | XXOXOXOXOXOXOXXXXXX | 684 |
| 6049 | GGCTU | * mU fU * mG * fG * mG * fA * mG * fG * mC * | XXS | |
| | | AMC6T * SmU | | |
| WV- | TAGCUUCUUGUCCAGCUU | T * fA * mG fC * mU fU * mC fU * mU fG * mU fC | XXOXOXOXOXOXOXXXXXX | 685 |
| 6050 | UAUTU | * mC fA * mG * fC * mU * fU * mU * fA * mU * | XXS | |
| | | AMC6T * SmU | | |
| WV- | TGUCCAGCUUUAUUGGGA | T * S fG * mU fC * mC fA * mG fC * mU * S fU * | SXOXOXOXSXOXSXXXXXXX | 686 |
| 6205 | GGCTU | mU fA * mU * S fU * mG * fG * mG * fA * mG * | XS | |
| | | fG * mC * TGaNC6T * SmU | | |
| WV- | TGUCCAGCUUUAUUGGGA | T * S fG * mU fC * mC fA * mG fC * mU * S fU * | SXOXOXOXSXOXSXXOOOO | 687 |
| 6206 | GGCTU | mU fA * mU * S fU * mG * fGmG fAmG fGmC * | OSS | |
| | | STGaNC6T * SmU | | |
| WV- | TGUCCAGCUUUAUUGGGA | T * S fG * mU fC * mC fA * mG fC * mU * fU * | SXOXOXOXXXOXXXXXXXXX | 688 |
| 6214 | GGCTU | mU fA * mU * fU * mG * fG * mG * fA * mG * fG | XS | |
| | | * mC * TGaNC6T * SmU | | |
| WV- | TGUCCAGCUUUAUUGGGA | T * S fG * mU fC * mC fA * mG fC * mU * fU * | SXOXOXOXXXOXXXXOOO | 689 |
| 6215 | GGCTU | mU fA * mU * fU * mG * fGmG fAmG fGmC * | OOSS | |
| | | STGaNC6T * SmU | | |
| WV- | TGUCCAGCUUUAUUGGGA | T * S fG * mU fC * mC fA * mG fC * mU * fU * | SXOXOXOXXXOXXXXXXXXX | 690 |
| 6411 | GGCTU | mU fA * mU * fU * mG * fG * mG * fA * mG * fG | XS | |
| | | * mC * T * SmU | | |
| WV- | TGUCCAGCUUUAUUGGGA | T * S fG * mU fC * mC fA * mG fC * mU * S fU * | SXOXOXOXSXOXSXXXXXXX | 691 |
| 6412 | GGCTU | mU fA * mU * S fU * mG * fG * mG * fA * mG * | XS | |
| | | fG * mC * T * SmU | | |
| WV- | TGUCCAGCUUUAUUGGGA | T * S fG * mU fC * mC fA * mG fC * mU * S fU * | SXOXOXOXSXOXOXXXXXX | 692 |
| 6413 | GGCTU | mU fA * mU fU * mG * fG * mG * fA * mG * fG * | XXS | |
| | | mC * T * SmU | | |
| WV- | TGUCCAGCUUUAUUGGGA | T * S fG * mU fC * mC fA * mG fC * mU fU * mU | SXOXOXOXOXOXSXXXXXX | 693 |
| 6414 | GGCTU | fA * mU * S fU * mG * fG * mG * fA * mG * fG * | XXS | |
| | | mC * T * SmU | | |
| WV- | TGUCCAGCUUUAUUGGGA | T * S fG * mU fC * mC fA * mG fC * mU * S fU * | SXOXOXOXSXOXSOXXXXXX | 694 |
| 6415 | GGCTU | mU fA * mU * S fUmG * fG * mG * fA * mG * fG | XS | |
| | | * mC * T * SmU | | |
| WV- | TGUCCAGCTUUATUGGGA | T * S fG * mU fC * mC fA * mG fC * Teo fU * mU | SXOXOXOXOXOXOXXXXXX | 695 |
| 6416 | GGCTU | fA * Teo fU * mG * fG * mG * fA * mG * fG * mC | XXS | |
| | | * T * SmU | | |
| WV- | TGUCCAGCTUUAUUGGGA | T * S fG * mU fC * mC fA * mG fC * Teo fU * mU | SXOXOXOXOXOXOXXXXXX | 696 |
| 6417 | GGCTU | fA * mU fU * mG * fG * mG * fA * mG * fG * mC | XXS | |
| | | * T * SmU | | |
| WV- | TGUCCAGCUUUATUGGGA | T * S fG * mU fC * mC fA * mG fC * mU fU * mU | SXOXOXOXOXOXOXXXXXX | 697 |
| 6418 | GGCTU | fA * Teo fU * mG * fG * mG * fA * mG * fG * mC | XXS | |
| | | * T * SmU | | |
| WV- | TGUCCAGCTUUATUGGGA | T * S fG * mU fC * mC fA * mG fC * Teo fU * mU | SXOXOXOXOXOXOOXXXXX | 698 |
| 6419 | GGCTU | fA * Teo fUmG * fG * mG * fA * mG * fG * mC * | XXS | |
| | | T * SmU | | |
| WV- | TAGCUUCUUGUCCAGCUU | T * S fA * mG fC * mU * fU * mC * fU * mU * fG * | SXOXXXXXXXOXOXXXXXXX | 699 |
| 6420 | UAUTU | mU fC * mC fA * mG * fC * mU * fU * mU * fA * | XS | |
| | | mU * T * SmU | | |
| WV- | TAGCUUCUUGUCCAGCUU | T * S fA * mG fC * mU * S fU * mC * S fU * mU * | SXOXSXSXSXOXOXXXXXXX | 700 |
| 6421 | UAUTU | S fG * mU fC * mC fA * mG * fC * mU * fU * mU | XS | |
| | | * fA * mU * T * SmU | | |
| WV- | TAGCUUCUUGUCCAGCUU | T * S fA * mG fC * mU * S fU * mC fU * mU fG * | SXOXSXOXOXOXOXXXXXX | 701 |
| 6422 | UAUTU | mU fC * mC fA * mG * fC * mU * fU * mU * fA * | XXS | |
| | | mU * T * SmU | | |
| WV- | TAGCUUCUUGUCCAGCUU | T * S fA * mG fC * mU fU * mC * S fU * mU fG * | SXOXOXSXOXOXOXXXXXX | 702 |
| 6423 | UAUTU | mU fC * mC fA * mG * fC * mU * fU * mU * fA * | XXS | |
| | | mU * T * SmU | | |
| WV- | TAGCUUCUUGUCCAGCUU | T * S fA * mG fC * mU fU * mC fU * mU * S fG * | SXOXOXOXSXOXOXXXXXX | 703 |
| 6424 | UAUTU | mU fC * mC fA * mG * fC * mU * fU * mU * fA * | XXS | |
| | | mU * T * SmU | | |
| WV- | TAGCUUCUUGUCCAGCUU | T * S fA * mG fC * mU * S fU * mC * S fU * mU * | SXOXSXSXSXOXOOXXXXXX | 704 |
| 6425 | UAUTU | S fG * mU fC * mC fAmG * fC * mU * fU * mU * | XS | |
| | | fA * mU * T * SmU | | |
| WV- | TAGCTUCUTGUCCAGCUU | T * S fA * mG fC * Teo fU * m5Ceo fU * Teo fG * | SXOXOXOXOXOXOXXXXXX | 705 |
| 6426 | UAUTU | mU fC * mC fA * mG * fC * mU * fU * mU * fA * | XXS | |
| | | mU * T * SmU | | |
| WV- | TAGCTUCUUGUCCAGCUU | T * S fA * mG fC * Teo fU * mC fU * mU fG * mU | SXOXOXOXOXOXOXXXXXX | 706 |
| 6427 | UAUTU | fC * mC fA * mG * fC * mU * fU * mU * fA * mU | XXS | |
| | | * T * SmU | | |
| WV- | TAGCUUCUUGUCCAGCUU | T * S fA * mG fC * mU fU * m5Ceo fU * mU fG * | SXOXOXOXOXOXOXXXXXX | 707 |
| 6428 | UAUTU | mU fC * mC fA * mG * fC * mU * fU * mU * fA * | XXS | |
| | | mU * T * SmU | | |
| WV- | TAGCUUCUTGUCCAGCUU | T * S fA * mG fC * mU fU * mC fU * Teo fG * mU | SXOXOXOXOXOXOXXXXXX | 708 |
| 6429 | UAUTU | fC * mC fA * mG * fC * mU * fU * mU * fA * mU | XXS | |
| | | * T * SmU | | |
| WV- | TAGCTUCUTGUCCAGCUU | T * S fA * mG fC * Teo fU * m5Ceo fU * Teo fG * | SXOXOXOXOXOXOOXXXXX | 709 |
| 6430 | UAUTU | mU fC * mC fAmG * fC * mU * fU * mU * fA * | XXS | |
| | | mU * T * SmU | | |
| WV- | TGUCCAGCUUUAUUGGGA | T * S fG * SmU fC * SmC fA * SmG fC * SmU * S | SSOSOSOSSSOSSSSSSSSSSS | 710 |
| 6431 | GGCTU | fU * SmU fA * SmU * S fU * SmG * S fG * SmG * | | |
| | | S fA * SmG * S fG * SmC * ST * SmU | | |
| WV- | TGUCCAGCUUUAUUGGGA | T * S fG * mU fC * mC fA * mG fC * mU * S fU * | SXOXOXOXSXOXSSXXXXXX | 711 |
| 6432 | GGCTU | mU fA * mU * S fU * SmG * fG * mG * fA * mG * | XS | |
| | | fG * mC * T * SmU | | |
| WV- | TGUCCAGCUUUAUUGGGA | T * S fG * mU fC * mC fA * mG fC * mU * S fU * | SXOXOXOXSXOXSXXXXXXX | 712 |
| 6433 | GGCTU | mU fA * mU * S fU * mG * mG * mG * mA * mG | XS | |
| | | * mG * mC * T * SmU | | |
| WV- | TGUCCAGCUUUAUUGGGA | T * S fG * mU fC * mC fA * mG fC * mU * S fU * | SXOXOXOXSXOXSXOOOO | 713 |
| 6434 | GGCTU | mU fA * mU * S fU * mGmGmGmAmGmGmC * T | OOXS | |
| | | * SmU | | |
| WV- | TGUCCAGCUUUAUUGGGA | T * S fG * mU fC * mC fA * mG fC * mU fU * mU | SXOXOXOXOXOXOXXXXXX | 714 |
| 6435 | GGCTU | fA * mU fU * Geo * fG * Geo * fA * Geo * fG * | XXS | |
| | | m5Ceo * T * SmU | | |
| WV- | TGUCCAGCUUUAUUGGGA | T * S fG * mU fC * mC fA * mG fC * mU * S fU * | SXOXOXOXSXOXSXXXXXXX | 715 |
| 6436 | GGCTU | mU fA * mU * S fU * Geo * fG * Geo * fA * Geo * | XS | |
| | | fG * m5Ceo * T * SmU | | |
| WV- | TGUCCAGCUUUAUUGGGA | T * S fG * mU fC * mC fA * mG fC * mU * S fU * | SXOXOXOXSXOXSXXXXXXX | 716 |
| 6437 | GGCTU | mU fA * mU * S fU * Geo * Geo * Geo * Aeo * | XS | |
| | | Geo * Geo * m5Ceo * T * SmU | | |
| WV- | TGUCCAGCUUUAUUGGGA | T * S fG * mU fC * mC fA * mG fC * mU * S fU * | SXOXOXOXSXOXSXOOOO | 717 |
| 6438 | GGCTU | mU fA * mU * S fU * | OOXS | |
| | | GeoGeoGeoAeoGeoGeom5Ceo * T * SmU | | |
| WV- | TGUCCAGCUUUAUUGGGA | T * fG * mU fC * mC fA * mG fC * mU fU * mU fA | XXOXOXOXOXOXOXXXXXX | 718 |
| 6439 | GGCTU | * mU fU * mG * fG * mG * fA * mG * fG * mC * T | XXX | |
| | | * mU | | |
| WV- | TGUCCAGCUUUAUUGGGA | T * fG * mU fC * mC fA * mG fC * mU fU * mU fA | XXOXOXOXOXOXOXXXXXX | 719 |
| 6440 | GGCTC | * mU fU * mG * fG * mG * fA * mG * fG * mC * T | XXX | |
| | | * mC | | |
| WV- | TGUCCAGCUUUAUUGGGA | T * fG * mU fC * mC fA * mG fC * mU fU * mU fA | XXOXOXOXOXOXOXXXXXX | 720 |
| 6441 | GGCTA | * mU fU * mG * fG * mG * fA * mG * fG * mC * T | XXX | |
| | | * mA | | |
| WV- | TGUCCAGCUUUAUUGGGA | T * fG * mU fC * mC fA * mG fC * mU fU * mU fA | XXOXOXOXOXOXOXXXXXX | 721 |
| 6442 | GGCTG | * mU fU * mG * fG * mG * fA * mG * fG * mC * T | XXX | |
| | | * mG | | |
| WV- | TGUCCAGCUUUAUUGGGA | T * fG * mUmC * mC fA * mG fC * mU fU * mU | XXOXOXOXOXOXOXXXXXX | 722 |
| 6443 | GGCTU | fA * mU fU * mG * fG * mG * fA * mG * fG * mC | XXX | |
| | | * T * mU | | |
| WV- | TGUCCAGCUUUAUUGGGA | T * fG * mU fC * mCmA * mG fC * mU fU * mU | XXOXOXOXOXOXOXXXXXX | 723 |
| 6444 | GGCTU | fA * mU fU * mG * fG * mG * fA * mG * fG * mC | XXX | |
| | | * T * mU | | |
| WV- | TGUCCAGCUUUAUUGGGA | T * fG * mU fC * mC fA * mGmC * mU fU * mU | XXOXOXOXOXOXOXXXXXX | 724 |
| 6445 | GGCTU | fA * mU fU * mG * fG * mG * fA * mG * fG * mC | XXX | |
| | | * T * mU | | |
| WV- | TGUCCAGCUUUAUUGGGA | T * fG * mU fC * mC fA * mG fC * fU fU * mU fA * | XXOXOXOXOXOXOXXXXXX | 725 |
| 6446 | GGCTU | mU fU * mG * fG * mG * fA * mG * fG * mC * T * | XXX | |
| | | mU | | |
| WV- | TGUCCAGCUUUAUUGGGA | T * fG * mU fC * mC fA * mG fC * mUmU * mU | XXOXOXOXOXOXOXXXXXX | 726 |
| 6447 | GGCTU | fA * mU fU * mG * fG * mG * fA * mG * fG * mC | XXX | |
| | | * T * mU | | |
| WV- | TGUCCAGCUUUAUUGGGA | T * fG * mU fC * mC fA * mG fC * mU fU * fU fA * | XXOXOXOXOXOXOXXXXXX | 727 |
| 6448 | GGCTU | mU fU * mG * fG * mG * fA * mG * fG * mC * T * | XXX | |
| | | mU | | |
| WV- | TGUCCAGCUUUAUUGGGA | T * fG * mU fC * mC fA * mG fC * mU fU * | XXOXOXOXOXOXOXXXXXX | 728 |
| 6449 | GGCTU | mUmA * mU fU * mG * fG * mG * fA * mG * fG * | XXX | |
| | | mC * T * mU | | |
| WV- | TGUCCAGCUUUAUUGGGA | T * fG * mU fC * mC fA * mG fC * mU fU * mU fA | XXOXOXOXOXOXOXXXXXX | 729 |
| 6450 | GGCTU | * fU fU * mG * fG * mG * fA * mG * fG * mC * T | XXX | |
| | | * mU | | |
| WV- | TGUCCAGCUUUAUUGGGA | T * fG * mU fC * mC fA * mG fC * mU fU * mU fA | XXOXOXOXOXOXOXXXXXX | 730 |
| 6451 | GGCTU | * mU fU * fG * fG * mG * fA * mG * fG * mC * T | XXX | |
| | | * mU | | |
| WV- | TGUCCAGCUUUAUUGGGA | T * fG * mU fC * mC fA * mG fC * mU fU * mU fA | XXOXOXOXOXOXOXXXXXX | 731 |
| 6452 | GGCTU | * mU fU * mG * mG * mG * fA * mG * fG * mC * | XXX | |
| | | T * mU | | |
| WV- | TGUCCAGCUUUAUUGGGA | T * fG * mU fC * mC fA * mG fC * mU fU * mU fA | XXOXOXOXOXOXOXXXXXX | 732 |
| 6453 | GGCTU | * mU fU * mG * fG * fG * fA * mG * fG * mC * T | XXX | |
| | | * mU | | |
| WV- | TGUCCAGCUUUAUUGGGA | T * fG * mU fC * mC fA * mG fC * mU fU * mU fA | XXOXOXOXOXOXOXXXXXX | 733 |
| 6454 | GGCTU | * mU fU * mG * fG * mG * mA * mG * fG * mC * | XXX | |
| | | T * mU | | |
| WV- | TGUCCAGCUUUAUUGGGA | T * fG * mU fC * mC fA * mG fC * mU fU * mU fA | XXOXOXOXOXOXOXXXXXX | 734 |
| 6455 | GGCTU | * mU fU * mG * fG * mG * fA * fG * fG * mC * T | XXX | |
| | | * mU | | |
| WV- | TGUCCAGCUUUAUUGGGA | T * fG * mU fC * mC fA * mG fC * mU fU * mU fA | XXOXOXOXOXOXOXXXXXX | 735 |
| 6456 | GGCTU | * mU fU * mG * fG * mG * fA * mG * mG * mC * | XXX | |
| | | T * mU | | |
| WV- | TGUCCAGCUUUAUUGGGA | T * fG * mU fC * mC fA * mG fC * mU fU * mU fA | XXOXOXOXOXOXOXXXXXX | 736 |
| 6457 | GGCTU | * mU fU * mG * fG * mG * fA * mG * fG * fC * T | XXX | |
| | | * mU | | |
| WV- | TGUCCAGCUUUAUUGGGA | T * S fG * SmU fCmC fAmG fCmU fUmU fAmU | SSOOOOOOOOOOOOOOO | 737 |
| 6458 | GGCTU | fUmG fGmG fAmG fGmC * ST * SmU | OOOSS | |
| WV- | TGUCCAGCUUUAUUGGGA | T * S fG * SmU fCmC fAmG fCmU fUmU fAmU | SSOOOOOOOOOOOOOOO | 738 |
| 6459 | GGCTU | fUmG fGmG fAmG fGmCT * SmU | OOOOS | |
| WV- | TGUCCAGCUUUAUUGGGA | T * S fGmU * S fCmC fAmG fCmU fUmU fAmU | SOSOOOOOOOOOOOOOO | 739 |
| 6460 | GGCTU | fUmG fGmG fAmG fGmCT * SmU | OOOOS | |
| WV- | TGUCCAGCUUUAUUGGGA | T * S fGmU fC * SmC fAmG fCmU fUmU fAmU | SOOSOOOOOOOOOOOOO | 740 |
| 6461 | GGCTU | fUmG fGmG fAmG fGmCT * SmU | OOOOS | |
| WV- | TGUCCAGCUUUAUUGGGA | T * S fGmU fCmC * S fAmG fCmU fUmU fAmU | SOOOSOOOOOOOOOOOO | 741 |
| 6462 | GGCTU | fUmG fGmG fAmG fGmCT * SmU | OOOOS | |
| WV- | TGUCCAGCUUUAUUGGGA | T * S fGmU fCmC fA * SmG fCmU fUmU fAmU | SOOOOSOOOOOOOOOOO | 742 |
| 6463 | GGCTU | fUmG fGmG fAmG fGmCT * SmU | OOOOS | |
| WV- | TGUCCAGCUUUAUUGGGA | T * S fGmU fCmC fAmG * S fCmU fUmU fAmU | SOOOOOSOOOOOOOOOO | 743 |
| 6464 | GGCTU | fUmG fGmG fAmG fGmCT * SmU | OOOOS | |
| WV- | TGUCCAGCUUUAUUGGGA | T * S fGmU fCmC fAmG fC * SmU fUmU fAmU | SOOOOOOSOOOOOOOOO | 744 |
| 6465 | GGCTU | fUmG fGmG fAmG fGmCT * SmU | OOOOS | |
| WV- | TGUCCAGCUUUAUUGGGA | T * S fGmU fCmC fAmG fCmU * S fUmU fAmU | SOOOOOOOSOOOOOOOO | 745 |
| 6466 | GGCTU | fUmG fGmG fAmG fGmCT * SmU | OOOOS | |
| WV- | TGUCCAGCUUUAUUGGGA | T * S fGmU fCmC fAmG fCmU fU * SmU fAmU | SOOOOOOOOSOOOOOOO | 746 |
| 6467 | GGCTU | fUmG fGmG fAmG fGmCT * SmU | OOOOS | |
| WV- | TGUCCAGCUUUAUUGGGA | T * S fGmU fCmC fAmG fCmU fUmU * S fAmU | SOOOOOOOOOSOOOOOO | 747 |
| 6468 | GGCTU | fUmG fGmG fAmG fGmCT * SmU | OOOOS | |
| WV- | TGUCCAGCUUUAUUGGGA | T * S fGmU fCmC fAmG fCmU fUmU fA * SmU | SOOOOOOOOOOSOOOOO | 748 |
| 6469 | GGCTU | fUmG fGmG fAmG fGmCT * SmU | OOOOS | |
| WV- | TGUCCAGCUUUAUUGGGA | T * S fGmU fCmC fAmG fCmU fUmU fAmU * S | SOOOOOOOOOOOSOOOO | 749 |
| 6470 | GGCTU | fUmG fGmG fAmG fGmCT * SmU | OOOOS | |
| WV- | TGUCCAGCUUUAUUGGGA | T * S fGmU fCmC fAmG fCmU fUmU fAmU fU * | SOOOOOOOOOOOOSOOO | 750 |
| 6496 | GGCTU | SmG fGmG fAmG fGmCT * SmU | OOOOS | |
| WV- | TGUCCAGCUUUAUUGGGA | T * S fGmU fCmC fAmG fCmU fUmU fAmU fUmG | SOOOOOOOOOOOOOSOO | 751 |
| 6497 | GGCTU | * S fGmG fAmG fGmCT * SmU | OOOOS | |
| WV- | TGUCCAGCUUUAUUGGGA | T * S fGmU fCmC fAmG fCmU fUmU fAmU fUmG | SOOOOOOOOOOOOOOSO | 752 |
| 6498 | GGCTU | fG * SmG fAmG fGmCT * SmU | OOOOS | |
| WV- | TGUCCAGCUUUAUUGGGA | T * S fGmU fCmC fAmG fCmU fUmU fAmU fUmG | SOOOOOOOOOOOOOOOS | 753 |
| 6499 | GGCTU | fGmG * S fAmG fGmCT * SmU | OOOOS | |
| WV- | TGUCCAGCUUUAUUGGGA | T * S fGmU fCmC fAmG fCmU fUmU fAmU fUmG | SOOOOOOOOOOOOOOO | 754 |
| 6500 | GGCTU | fGmG fA * SmG fGmCT * SmU | OSOOOS | |
| WV- | TGUCCAGCUUUAUUGGGA | T * S fGmU fCmC fAmG fCmU fUmU fAmU fUmG | SOOOOOOOOOOOOOOO | 755 |
| 6501 | GGCTU | fGmG fAmG * S fGmCT * SmU | OOSOOS | |
| WV- | TGUCCAGCUUUAUUGGGA | T * S fGmU fCmC fAmG fCmU fUmU fAmU fUmG | SOOOOOOOOOOOOOOO | 756 |
| 6502 | GGCTU | fGmG fAmG fG * SmCT * SmU | OOOSOS | |
| WV- | TGUCCAGCUUUAUUGGGA | T * S fGmU fCmC fAmG fCmU fUmU fAmU fUmG | SOOOOOOOOOOOOOOO | 757 |
| 6503 | GGCTU | fGmG fAmG fGmC * ST * SmU | OOOOSS | |
| WV- | TGUCCAGCUUUAUUGGGA | T * S fG * mU fC * mC fA * mG fC * mU * fU * | SXOXOXOXXXOXXXXXXXXX | 758 |
| 6504 | GGCTU | mU fA * mU * fU * mG * fG * mG * fA * mG * fG | XS | |
| | | * mC * AMC6T * SmU | | |
| WV- | TGUCCAGCUUUAUUGGGA | T * S fG * mU fC * mC fA * mG fC * mU * fU * | SXOXOXOXXXOXXXXOOO | 759 |
| 6505 | GGCTU | mU fA * mU * fU * mG * fGmG fAmG fGmC * | OOSS | |
| | | SAMC6T * SmU | | |
| WV- | AGCTTCTTGTCCAGCTTTAT | Mod001L001Aeo * SGeo * Sm5Ceo * STeo * | OSSSSSSSSSSSSSSSSSSS | 760 |
| 6541 | | STeo * SC * ST * ST * SG * ST * SC * SC * SA * SG | | |
| | | * SC * STeo * STeo * STeo * SAeo * STeo | | |
| WV- | AGCTTCTTGTCCAGCTTTAT | Mod001L001Aeo * SGeo * Rm5Ceo * RTeo * | OSRRRRSSSSSSSSSRRRRS | 761 |
| 6542 | | RTeo * RC * ST * ST * SG * ST * SC * SC * SA * SG | | |
| | | * SC * RTeo * RTeo * RTeo * RAeo * STeo | | |
| WV- | AGCTTCTTGTCCAGCTTTAT | Mod001L001Aeo * SGeo * Rm5Ceo * RTeo * | OSRRRSSSSSSSSSSSRRRS | 762 |
| 6543 | | RTeo * SC * ST * ST * SG * ST * SC * SC * SA * SG | | |
| | | * SC * STeo * RTeo * RTeo * RAeo * STeo | | |
| WV- | AGCTTCTTGTCCAGCTTTAT | Mod001L001Aeo * Geom5CeoTeoTeo * C * T * T | OXOOOXXXXXXXXXXXOOO | 763 |
| 6544 | | * G * T * C * C * A * G * C * TeoTeoTeoAeo * Teo | X | |
| WV- | AGCTTCTTGTCCAGCTTTAT | Mod001L001Aeo * SGeom5CeoTeoTeo * RC * ST | OSOOORSSSSSSSSSROOOS | 764 |
| 6545 | | * ST * SG * ST * SC * SC * SA * SG * SC * | | |
| | | RTeoTeoTeoAeo * STeo | | |
| WV- | AGCTTCTTGTCCAGCTTTAT | Mod001L001Aeo * SGeom5CeoTeoTeo * SC * ST | OSOOOSSSSSSSSSSSOOOS | 765 |
| 6546 | | * ST * SG * ST * SC * SC * SA * SG * SC * | | |
| | | STeoTeoTeoAeo * STeo | | |
| WV- | AGCUTCTTGTCCAGCTUUA | Mod001L001mA * SmGmCmUTeo * SC * ST * ST | OSOOOSSSSRSSRSSSOOOS | 766 |
| 6547 | U | * SG * RT * SC * SC * RA * SG * SC * | | |
| | | STeomUmUmA * SmU | | |
| WV- | AGCUUCTTGTCCAGCUUU | Mod001L001mA * RmG * RmC * RmU * RmU * | ORRRRRSSSRSSRSSRRRRR | 767 |
| 6548 | AU | RC * ST * ST * SG * RT * SC * SC * RA * SG * SC * | | |
| | | RmU * RmU * RmU * RmA * RmU | | |
| WV- | AGCUUCTTGTCCAGCUUU | Mod001L001mA * SmG *SmC* SmU *SmU * SC | OSSSSSSSSSSSSSSSSSSS | 768 |
| 6549 | AU | * ST * ST * SG * ST * SC * SC * SA * SG * SC * | | |
| | | SmU * SmU * SmU * SmA * SmU | | |
| WV- | AGCUUCTTGTCCAGCUUU | Mod001L001mA * SmG * RmC * RmU * RmU * | OSRRRRSSSRSSRSSRRRRS | 769 |
| 6550 | AU | RC * ST * ST * SG * RT * SC * SC * RA * SG * SC * | | |
| | | RmU * RmU * RmU * RmA * SmU | | |
| WV- | AGCUUCTTGTCCAGCUUU | Mod001L001mA * SmG * RmC * RmU * RmU * | OSRRRSSSSRSSRSSSRRRS | 770 |
| 6551 | AU | SC * ST * ST * SG * RT * SC * SC * RA * SG * SC * | | |
| | | SmU * RmU * RmU * RmA * SmU | | |
| WV- | AGCUUCTTGTCCAGCUUU | Mod001L001mA * mGmCmUmU * C * T * T * G | OXOOOXXXXXXXXXXXOOO | 771 |
| 6552 | AU | * T * C * C * A * G * C * mUmUmUmA * mU | X | |
| WV- | AGCUUCTTGTCCAGCUUU | Mod001L001mA * SmGmCmUmU * RC * ST * ST | OSOOORSSSRSSRSSROOO | 772 |
| 6553 | AU | * SG * RT * SC * SC * RA * SG * SC * | S | |
| | | RmUmUmUmA * SmU | | |
| WV- | AGCUUCTTGTCCAGCUUU | Mod001L001mA * SmGmCmUmU * SC * ST * ST | OSOOOSSSSRSSRSSSOOOS | 773 |
| 6554 | AU | * SG * RT * SC * SC * RA * SG * SC * | | |
| | | SmUmUmUmA * SmU | | |
| WV- | AGCTTCTTGTCCAGCTTTAT | Mod001L001Aeo * SGeo * Sm5Ceo * STeo * | OSSSSSSSSRSSRSSSSSSS | 774 |
| 6555 | | STeo * SC * ST * ST * SG * RT * SC * SC * RA * SG | | |
| | | * SC * STeo * STeo * STeo * SAeo * STeo | | |
| WV- | AGCTTCTTGTCCAGCTTTAT | Mod001L001Aeo * SGeo * Rm5Ceo * RTeo * | OSRRRRSSSRSSRSSRRRRS | 775 |
| 6556 | | RTeo * RC * ST * ST * SG * RT * SC * SC * RA * SG | | |
| | | * SC * RTeo * RTeo * RTeo * RAeo * STeo | | |
| WV- | AGCTTCTTGTCCAGCTTTAT | Mod001L001Aeo * SGeo * Rm5Ceo * RTeo * | OSRRRSSSSRSSRSSSRRRS | 776 |
| 6557 | | RTeo * SC * ST * ST * SG * RT * SC * SC * RA * SG | | |
| | | * SC * STeo * RTeo * RTeo * RAeo * STeo | | |
| WV- | AGCTTCTTGTCCAGCTTTAT | Mod001L001Aeo * SGeom5CeoTeoTeo * RC * ST | OSOOORSSSRSSRSSROOO | 777 |
| 6558 | | * ST * SG * RT * SC * SC * RA * SG * SC * | S | |
| | | RTeoTeoTeoAeo * STeo | | |
| WV- | AGCTTCTTGTCCAGCTTTAT | Mod001L001Aeo * SGeom5CeoTeoTeo * SC * ST | OSOOOSSSSRSSRSSSOOOS | 778 |
| 6559 | | * ST * SG * RT * SC * SC * RA * SG * SC * | | |
| | | STeoTeoTeoAeo * STeo | | |
| WV- | AGCTTCTTGTCCAGCTTTAT | Mod001L001Aeo * RGeom5CeoTeoTeo * RC * ST | OROOORSSSRSSRSSROOO | 779 |
| 6561 | | * ST * SG * RT * SC * SC * RA * SG * SC * | R | |
| | | RTeoTeoTeoAeo * RTeo | | |
| WV- | AGCTTCTTGTCCAGCTTTAT | Mod001L001Aeo * RGeom5CeoTeoTeo * SC * ST | OROOOSSSSRSSRSSSOOO | 780 |
| 6562 | | * ST * SG * RT * SC * SC * RA * SG * SC * | R | |
| | | STeoTeoTeoAeo * RTeo | | |
| WV- | AGCUTCTTGTCCAGCTUUA | Mod001L001Aeo * mG * mC * mU * Teo * C * T | OXXXXXXXXXXXXXXXXXXX | 781 |
| 6563 | T | * T * G * T * C * C * A * G * C * Teo * mU * mU * | | |
| | | Aeo * Teo | | |
| WV- | AGCUTCTTGTCCAGCTUUA | Mod001L001Aeo * RmG * RmC * RmU * RTeo * | ORRRRRSSSRSSRSSRRRRR | 782 |
| 6564 | T | RC * ST * ST * SG * RT * SC * SC * RA * SG * SC * | | |
| | | RTeo * RmU * RmU * RAeo * RTeo | | |
| WV- | AGCUTCTTGTCCAGCTUUA | Mod001L001Aeo * SmG * SmC * SmU * STeo * | OSSSSSSSSRSSRSSSSSSS | 783 |
| 6565 | T | SC * ST * ST * SG * RT * SC * SC * RA * SG * SC * | | |
| | | STeo * SmU * SmU * SAeo * STeo | | |
| WV- | AGCUUCTTGTCCAGCTUUA | Mod001L001Aeo * SmG * RmC * RmU * RmU * | OSRRRRSSSRSSRSSRRRRS | 784 |
| 6566 | T | RC * ST * ST * SG * RT * SC * SC * RA * SG * SC * | | |
| | | RTeo * RmU * RmU * RAeo * STeo | | |
| WV- | AGCUTCTTGTCCAGCTUUA | Mod001L001Aeo * SmG * RmC * RmU * RTeo * | OSRRRSSSSRSSRSSSRRRS | 785 |
| 6567 | T | SC * ST * ST * SG * RT * SC * SC * RA * SG * SC * | | |
| | | STeo * RmU * RmU * RAeo * STeo | | |
| WV- | AGCUTCTTGTCCAGCTUUA | Mod001L001Aeo * mGmCmUTeo * C * T * T * G | OXOOOXXXXXXXXXXXOOO | 786 |
| 6568 | T | * T * C * C * A * G * C * TeomUmUAeo * Teo | X | |
| WV- | AGCUTCTTGTCCAGCTUUA | Mod001L001Aeo * SmGmCmUTeo * RC * ST * ST | OSOOORSSSRSSRSSROOO | 787 |
| 6569 | T | * SG * RT * SC * SC * RA * SG * SC * | S | |
| | | RTeomUmUAeo * STeo | | |
| WV- | AGCUTCTTGTCCAGCTUUA | Mod001L001Aeo * SmGmCmUTeo * SC * ST * ST | OSOOOSSSSRSSRSSSOOOS | 788 |
| 6570 | T | * SG * RT * SC * SC * RA * SG * SC * | | |
| | | STeomUmUAeo * STeo | | |
| WV- | AGCUTCTTGTCCAGCTUUA | Mod001L001Aeo * RmGmCmUTeo * RC * ST * | OROOORSSSRSSRSSROOO | 789 |
| 6571 | T | ST * SG * RT * SC * SC * RA * SG * SC * | R | |
| | | RTeomUmUAeo * RTeo | | |
| WV- | AGCUTCTTGTCCAGCTUUA | Mod001L001Aeo * RmGmCmUTeo * SC * ST * ST | OROOOSSSSRSSRSSSOOO | 790 |
| 6572 | T | * SG * RT * SC * SC * RA * SG * SC * | R | |
| | | STeomUmUAeo * RTeo | | |
| WV- | AGCTTCTTGTCCAGCTTTAT | Mod001L001Aeo * SGeo * Sm5Ceo * STeo * | OSSSSRSSSRSSRSSRSSSS | 791 |
| 6757 | | STeo * RC * ST * ST * SG * RT * SC * SC * RA * SG | | |
| | | * SC * RTeo * STeo * STeo * SAeo * STeo | | |
| WV- | AGCTTCTTGTCCAGCTTTAT | Aeo * SGeo * Sm5Ceo * STeo * STeo * SC * ST * | SSSSSSSSRSSRSSSSSSS | 792 |
| 6758 | | ST * SG * RT * SC * SC * RA * SG * SC * STeo * | | |
| | | STeo * STeo * SAeo * STeo | | |
| WV- | AGCTTCTTGTCCAGCTTTAT | Aeo * SGeo * Sm5Ceo * STeo * STeo * RC * ST * | SSSSRSSSRSSRSSRSSSS | 793 |
| 6759 | | ST * SG * RT * SC * SC * RA * SG * SC * RTeo * | | |
| | | STeo * STeo * SAeo * STeo | | |
| WV- | AGCTTCTTGTCCAGCTTTAT | Aeo * Geom5CeoTeoTeo * C * T * T * G * T * C * | XOOOXXXXXXXXXXXOOOX | 794 |
| 6760 | | C * A * G * C * TeoTeoTeoAeo * Teo | | |
| WV- | AGCTTCTTGTCCAGCTTTAT | Aeo * SGeom5CeoTeoTeo * RC * ST * ST * SG * | SOOORSSSRSSRSSROOOS | 795 |
| 6761 | | RT * SC * SC * RA * SG * SC * RTeoTeoTeoAeo * | | |
| | | STeo | | |
| WV- | AGCTTCTTGTCCAGCTTTAT | Aeo * SGeom5CeoTeoTeo * SC * ST * ST * SG * | SOOOSSSSRSSRSSSOOOS | 796 |
| 6762 | | RT * SC * SC * RA * SG * SC * STeoTeoTeoAeo * | | |
| | | STeo | | |
| WV- | TGUCCAGCUUUAUUGGGA | T * S fG * SmU fC * SmC fA * SmG fC * SmU fU * | SSOSOSOSOSOSOSSSSSSSS | 797 |
| 6763 | GGCTU | SmU fA * SmU fU * SmG * S fG * SmG * S fA * | S | |
| | | SmG * S fG * SmC * ST * SmU | | |
| WV- | TAGCUUCUUGUCCAGCUU | T * S fA * SmG fC * SmU * S fU * SmC * S fU * | SSOSSSSSSSOSOSSSSSSSSS | 798 |
| 6764 | UAUTU | SmU * S fG * SmU fC * SmC fA * SmG * S fC * | | |
| | | SmU * S fU * SmU * S fA * SmU * ST * SmU | | |
| WV- | TAGCUUCUUGUCCAGCUU | T * S fA * SmG fC * SmU fU * SmC fU * SmU fG * | SSOSOSOSOSOSOSSSSSSSS | 799 |
| 6765 | UAUTU | SmU fC * SmC fA * SmG * S fC * SmU * S fU * | S | |
| | | SmU * S fA * SmU * ST * SmU | | |
| WV- | TGUCCAGCUUUAUUGGGA | VPT * fG * mU fC * mC fA * mG fC * mU fU * mU | XXOXOXOXOXOXOXOOOO | 800 |
| 6766 | GTU | fA * mU fU * mG fGmG fAmG * T * mU | XX | |
| WV- | AGCTTCTTGTCCAGCTTTAT | L001Aeo * SGeo * Sm5Ceo * STeo * STeo * SC * | OSSSSSSSSRSSRSSSSSSS | 801 |
| 7104 | | ST * ST * SG * RT * SC * SC * RA * SG * SC * STeo | | |
| | | * STeo * STeo * SAeo * STeo | | |
| WV- | AGCTTCTTGTCCAGCTTTAT | L001Aeo * SGeo * Sm5Ceo * STeo * STeo * RC * | OSSSSRSSSRSSRSSRSSSS | 802 |
| 7105 | | ST * ST * SG * RT * SC * SC * RA * SG * SC * RTeo | | |
| | | * STeo * STeo * SAeo * STeo | | |
| WV- | AGCTTCTTGTCCAGCTTTAT | L001Aeo * Geom5CeoTeoTeo * C * T * T * G * T | OXOOOXXXXXXXXXXXOOO | 803 |
| 7106 | | * C * C * A * G * C * TeoTeoTeoAeo * Teo | X | |
| WV- | AGCTTCTTGTCCAGCTTTAT | L001Aeo * SGeom5CeoTeoTeo * RC * ST * ST * | OSOOORSSSRSSRSSROOO | 804 |
| 7107 | | SG * RT * SC * SC * RA * SG * SC * | S | |
| | | RTeoTeoTeoAeo * STeo | | |
| WV- | AGCTTCTTGTCCAGCTTTAT | L001Aeo * SGeom5CeoTeoTeo * SC * ST * ST * | OSOOOSSSSRSSRSSSOOOS | 805 |
| 7108 | | SG * RT * SC * SC * RA * SG * SC * | | |
| | | STeoTeoTeoAeo * STeo | | |
| WV- | ATAGCAGCTTCTTGTCCAG | Aeo * Teo * Aeo * Geo * m5Ceo * A * G * C * T * | XXXXXXXXXXXXXXXXXXX | 806 |
| 7139 | C | T * C * T * T * G * T * m5Ceo * m5Ceo * Aeo * | | |
| | | Geo * m5Ceo | | |
| WV- | ATAGCAGCTTCTTGTCCAG | mA * Teo * Aeo * Geo * m5Ceo * A * G * C * T * | XXXXXXXXXXXXXXXXXXX | 807 |
| 7140 | C | T * C * T * T * G * T * m5Ceo * m5Ceo * Aeo * | | |
| | | Geo * mC | | |
| WV- | AUAGCAGCTTCTTGTCCAU | Aeo * mU * Aeo * Geo * m5Ceo * A * G * C * T * | XXXXXXXXXXXXXXXXXXX | 808 |
| 7141 | C | T * C * T * T * G * T * m5Ceo * m5Ceo * Aeo * | | |
| | | mU * m5Ceo | | |
| WV- | ATAGCAGCTTCTTGTCCAG | Aeo * Teo * mA * Geo * m5Ceo * A * G * C * T * | XXXXXXXXXXXXXXXXXXX | 809 |
| 7142 | C | T * C * T * T * G * T * m5Ceo * m5Ceo * mA * | | |
| | | Geo * m5Ceo | | |
| WV- | ATAGCAGCTTCTTGTCCAG | Aeo * Teo * Aeo * mG * m5Ceo * A * G * C * T * | XXXXXXXXXXXXXXXXXXX | 810 |
| 7143 | C | T * C * T * T * G * T * m5Ceo * mC * Aeo * Geo * | | |
| | | m5Ceo | | |
| WV- | ATAGCAGCTTCTTGTCCAG | Aeo * Teo * Aeo * Geo * mC * A * G * C * T * T * | XXXXXXXXXXXXXXXXXXX | 811 |
| 7144 | C | C * T * T * G * T * mC * m5Ceo * Aeo * Geo * | | |
| | | m5Ceo | | |
| WV- | AUAGCAGCTTCTTGTCCAG | mA * mU * Aeo * Geo * m5Ceo * A * G * C * T * | XXXXXXXXXXXXXXXXXXX | 812 |
| 7145 | C | T * C * T * T * G * T * m5Ceo * m5Ceo * Aeo * | | |
| | | mG * mC | | |
| WV- | ATAGCAGCTTCTTGTCCAG | mA * Teo * mA * Geo * m5Ceo * A * G * C * T * | XXXXXXXXXXXXXXXXXXX | 813 |
| 7146 | C | T * C * T * T * G * T * m5Ceo * m5Ceo * mA * | | |
| | | Geo * mC | | |
| WV- | ATAGCAGCTTCTTGTCCAG | mA * Teo * Aeo * mG * m5Ceo * A * G * C * T * | XXXXXXXXXXXXXXXXXXX | 814 |
| 7147 | C | T * C * T * T * G * T * m5Ceo * mC * Aeo * Geo * | | |
| | | mC | | |
| WV- | ATAGCAGCTTCTTGTCCAG | mA * Teo * Aeo * Geo * mC * A * G * C * T * T * | XXXXXXXXXXXXXXXXXXX | 815 |
| 7148 | C | C * T * T * G * T * mC * m5Ceo * Aeo * Geo * mC | | |
| WV- | AUAGCAGCTTCTTGTCCAU | Aeo * mU * mA * Geo * m5Ceo * A * G * C * T * | XXXXXXXXXXXXXXXXXXX | 816 |
| 7149 | C | T * C * T * T * G * T * m5Ceo * m5Ceo * mA * | | |
| | | mU * m5Ceo | | |
| WV- | AUAGCAGCTTCTTGTCCAU | Aeo * mU * Aeo * mG * m5Ceo * A * G * C * T * | XXXXXXXXXXXXXXXXXXX | 817 |
| 7150 | C | T * C * T * T * G * T * m5Ceo * mC * Aeo * mU * | | |
| | | m5Ceo | | |
| WV- | AUAGCAGCTTCTTGTCCAU | Aeo * mU * Aeo * Geo * mC * A * G * C * T * T * | XXXXXXXXXXXXXXXXXXX | 818 |
| 7151 | C | C * T * T * G * T * mC * m5Ceo * Aeo * mU * | | |
| | | m5Ceo | | |
| WV- | ATAGCAGCTTCTTGTCCAG | Aeo * Teo * mA * mG * m5Ceo * A * G * C * T * | XXXXXXXXXXXXXXXXXXX | 819 |
| 7152 | C | T * C * T * T * G * T * m5Ceo * mC * mA * Geo * | | |
| | | m5Ceo | | |
| WV- | ATAGCAGCTTCTTGTCCAG | Aeo * Teo * mA * Geo * mC * A * G * C * T * T * | XXXXXXXXXXXXXXXXXXX | 820 |
| 7153 | C | C * T * T * G * T * mC * m5Ceo * mA * Geo * | | |
| | | m5Ceo | | |
| WV- | ATAGCAGCTTCTTGTCCAG | Aeo * Teo * Aeo * mG * mC * A * G * C * T * T * | XXXXXXXXXXXXXXXXXXX | 821 |
| 7154 | C | C * T * T * G * T * mC * mC * Aeo * Geo * m5Ceo | | |
| WV- | AUAGCAGCTTCTTGTCCAG | mA * mU * mA * Geo * m5Ceo * A * G * C * T * | XXXXXXXXXXXXXXXXXXX | 822 |
| 7155 | C | T * C * T * T * G * T * m5Ceo * m5Ceo * mA * | | |
| | | mG * mC | | |
| WV- | AUAGCAGCTTCTTGTCCAG | mA * mU * Aeo * mG * m5Ceo * A * G * C * T * | XXXXXXXXXXXXXXXXXXX | 823 |
| 7156 | C | T * C * T * T * G * T * m5Ceo * mC * Aeo * mG * | | |
| | | mC | | |
| WV- | AUAGCAGCTTCTTGTCCAG | mA * mU * Aeo * Geo * mC * A * G * C * T * T * | XXXXXXXXXXXXXXXXXXX | 824 |
| 7157 | C | C * T * T * G * T * mC * m5Ceo * Aeo * mG * mC | | |
| WV- | ATAGCAGCTTCTTGTCGAG | mA * Teo * mA * mG * m5Ceo * A * G * C * T * T | XXXXXXXXXXXXXXXXXXX | 825 |
| 7158 | C | * C * T * T * G * T * m5Ceo * mG * mA * Geo * | | |
| | | mC | | |
| WV- | ATAGCAGCTTCTTGTCCAG | mA * Teo * mA * Geo * mC * A * G * C * T * T * | XXXXXXXXXXXXXXXXXXX | 826 |
| 7159 | C | C * T * T * G * T * mC * m5Ceo * mA * Geo * mC | | |
| WV- | ATAGCAGCTTCTTGTCCAG | mA * Teo * Aeo * mG * mC * A * G * C * T * T * | XXXXXXXXXXXXXXXXXXX | 827 |
| 7160 | C | C * T * T * G * T * mC * mC * Aeo * Geo * mC | | |
| WV- | AUAGCAGCTTCTTGTCCAU | Aeo * mU * mA * mG * m5Ceo * A * G * C * T * | XXXXXXXXXXXXXXXXXXX | 828 |
| 7161 | C | T * C * T * T * G * T * m5Ceo * mC * mA * mU * | | |
| | | m5Ceo | | |
| WV- | AUAGCAGCTTCTTGTCCAU | Aeo * mU * mA * Geo * mC * A * G * C * T * T * | XXXXXXXXXXXXXXXXXXX | 829 |
| 7162 | C | C * T * T * G * T * mC * m5Ceo * mA * mU * | | |
| | | m5Ceo | | |
| WV- | AUAGCAGCTTCTTGTCCAU | Aeo * mU * Aeo * mG * mC * A * G * C * T * T * | XXXXXXXXXXXXXXXXXXX | 830 |
| 7163 | C | C * T * T * G * T * mC * mC * Aeo * mU * m5Ceo | | |
| WV- | ATAGCAGCTTCTTGTCCAG | Aeo * Teo * mA * mG * mC * A * G * C * T * T * | XXXXXXXXXXXXXXXXXXX | 831 |
| 7164 | C | C * T * T * G * T * mC * mC * mA * Geo * m5Ceo | | |
| WV- | AUAGCAGCTTCTTGTCCAG | mA * mU * mA * mG * m5Ceo * A * G * C * T * T | XXXXXXXXXXXXXXXXXXX | 832 |
| 7165 | C | * C * T * T * G * T * m5Ceo * mC * mA * mG * | | |
| | | mC | | |
| WV- | AUAGCAGCTTCTTGTCCAG | mA * mU * mA * Geo * mC * A * G * C * T * T * C | XXXXXXXXXXXXXXXXXXX | 833 |
| 7166 | C | * T * T * G * T * mC * m5Ceo * mA * mG * mC | | |
| WV- | AUAGCAGCTTCTTGTCCAG | mA * mU * Aeo * mG * mC * A * G * C * T * T * C | XXXXXXXXXXXXXXXXXXX | 834 |
| 7167 | C | * T * T * G * T * mC * mC * Aeo * mG * mC | | |
| WV- | ATAGCAGCTTCTTGTCCAG | mA * Teo * mA * mG * mC * A * G * C * T * T * C | XXXXXXXXXXXXXXXXXXX | 835 |
| 7168 | C | * T * T * G * T * mC * mC * mA * Geo * mC | | |
| WV- | AUAGCAGCTTCTTGTCCAG | Aeo * mU * mA * mG * mC * A * G * C * T * T * C | XXXXXXXXXXXXXXXXXXX | 836 |
| 7169 | C | * T * T * G * T * mC * mC * mA * mG * m5Ceo | | |
| WV- | AUAGCAGCTTCTTGTCCAG | Aeo * mU * Aeo * Geo * m5Ceo * A * G * C * T * | XXXXXXXXXXXXXXXXXXX | 837 |
| 7170 | C | T * C * T * T * G * T * m5Ceo * m5Ceo * Aeo * | | |
| | | mG * m5Ceo | | |
| WV- | AUAGCAGCTTCTTGTCCAG | Aeo * mU * mA * Geo * m5Ceo * A * G * C * T * | XXXXXXXXXXXXXXXXXXX | 838 |
| 7171 | C | T * C * T * T * G * T * m5Ceo * m5Ceo * mA * | | |
| | | mG * m5Ceo | | |
| WV- | AUAGCAGCTTCTTGTCCAG | Aeo * mU * Aeo * mG * m5Ceo * A * G * C * T * | XXXXXXXXXXXXXXXXXXX | 839 |
| 7172 | C | T * C * T * T * G * T * m5Ceo * mC * Aeo * mG * | | |
| | | m5Ceo | | |
| WV- | AUAGCAGCTTCTTGTCCAG | Aeo * mU * Aeo * Geo * mC * A * G * C * T * T * | XXXXXXXXXXXXXXXXXXX | 840 |
| 7173 | C | C * T * T * G * T * mC * m5Ceo * Aeo * mG * | | |
| | | m5Ceo | | |
| WV- | AUAGCAGCTTCTTGTCCAG | Aeo * mU * mA * mG * m5Ceo * A * G * C * T * | XXXXXXXXXXXXXXXXXXX | 841 |
| 7174 | C | T * C * T * T * G * T * m5Ceo * mC * mA * mG * | | |
| | | m5Ceo | | |
| WV- | AUAGCAGCTTCTTGTCCAG | Aeo * mU * mA * Geo * mC * A * G * C * T * T * | XXXXXXXXXXXXXXXXXXX | 842 |
| 7175 | C | C * T * T * G * T * mC * m5Ceo * mA * mG * | | |
| | | m5Ceo | | |
| WV- | AUAGCAGCTTCTTGTCCAG | Aeo * mU * Aeo * mG * mC * A * G * C * T * T * | XXXXXXXXXXXXXXXXXXX | 843 |
| 7176 | C | C * T * T * G * T * mC * mC * Aeo * mG * m5Ceo | | |
| WV- | TGUCCAGCUUAUUGGGAG | VPT * fG * mU fC * mC fA * mG fC * ImU fU * mU | XXOXOXOXOXOXOXXXXXX | 844 |
| 7302 | GCTU | fA * mU fU * mG * fG * mG * fA * mG * fG * mC | XXS | |
| | | * TGaNC6T * SmU | | |
| WV- | TGUCCAGCUUAUUGGGAG | VPT * fG * mU fC * mC fA * mG fC * mU fU * ImU | XXOXOXOXOXOXOXXXXXX | 845 |
| 7303 | GCTU | fA * mU fU * mG * fG * mG * fA * mG * fG * mC | XXS | |
| | | * TGaNC6T * SmU | | |
| WV- | TGUCCAGCUUAUUGGGAG | VPT * fG * mU fC * mC fA * mG fC * ImU * fU * | XXOXOXOXXXOXXXXXXXX | 846 |
| 7304 | GCTU | mU fA * mU * fU * mG * fG * mG * fA * mG * fG | XXS | |
| | | * mC * TGaNC6T * SmU | | |
| WV- | TGUCCAGCUUAUUGGGAG | VPT * fG * mU fC * mC fA * mG fC * mU * fU * | XXOXOXOXXXOXXXXXXXX | 847 |
| 7305 | GCTU | ImU fA * mU * fU * mG * fG * mG * fA * mG * fG | XXS | |
| | | * mC * TGaNC6T * SmU | | |
| WV- | TGUCCAGCUUAUUGGGAG | VPT * fG * mU fC * mC fA * mG fC * ImU fU * mU | XXOXOXOXOXOXOXXXXXX | 848 |
| 7323 | GCTU | fA * mU fU * mG * fG * mG * fA * mG * fG * mC | XXS | |
| | | * AMC6T * SmU | | |
| WV- | TGUCCAGCUUAUUGGGAG | VPT * fG * mU fC * mC fA * mG fC * mU fU * ImU | XXOXOXOXOXOXOXXXXXX | 849 |
| 7324 | GCTU | fA * mU fU * mG * fG * mG * fA * mG * fG * mC | XXS | |
| | | * AMC6T * SmU | | |
| WV- | TGUCCAGCUUAUUGGGAG | VPT * fG * mU fC * mC fA * mG fC * ImU * fU * | XXOXOXOXXXOXXXXXXXX | 850 |
| 7325 | GCTU | mU fA * mU * fU * mG * fG * mG * fA * mG * fG | XXS | |
| | | * mC * AMC6T * SmU | | |
| WV- | TGUCCAGCUUAUUGGGAG | VPT * fG * mU fC * mC fA * mG fC * mU * fU * | XXOXOXOXXXOXXXXXXXX | 851 |
| 7326 | GCTU | ImU fA * mU * fU * mG * fG * mG * fA * mG * fG | XXS | |
| | | * mC * AMC6T * SmU | | |
| WV- | TGUCCAGCUUUAUUGGGA | T * S fG * SmU fC * SmC fA * SmG fC * SmU * S | SSOSOSOSSSOSSSSSSSSSSS | 852 |
| 7490 | GGCTU | fU * SmU fA * SmU * S fU * SmG * S fG * SmG * | | |
| | | S fA * SmG * S fG * SmC * STGaNC6T * SmU | | |
| WV- | TAGCUUCUUGUCCAGCUU | T * S fA * SmG fC * SmU * S fU * SmC * S fU * | SSOSSSSSSSOSOSSSSSSSSS | 853 |
| 7491 | UAUTU | SmU * S fG * SmU fC * SmC fA * SmG * S fC * | | |
| | | SmU * S fU * SmU * S fA * SmU * STGaNC6T * | | |
| | | SmU | | |
| WV- | TGUCCAGCUUUAUUGGGA | VPT * S fG * SmU fC * SmC fA * SmG fC * SmU * | SSOSOSOSSSOSSSSSSSSSSS | 854 |
| 7492 | GGCTU | S fU * SmU fA * SmU * S fU * SmG * S fG * SmG | | |
| | | * S fA * SmG * S fG * SmC * STGaNC6T * SmU | | |
| WV- | TAGCUUCUUGUCCAGCUU | VPT * S fA * SmG fC * SmU * S fU * SmC * S fU * | SSOSSSSSSSOSOSSSSSSSSS | 855 |
| 7493 | UAUTU | SmU * S fG * SmU fC * SmC fA * SmG * S fC * | | |
| | | SmU * S fU * SmU * S fA * SmU * STGaNC6T * | | |
| | | SmU | | |
| WV- | TGUCCAGCUUUAUUGGGA | T * S fG * SmU fC * SmC fA * SmG fC * SImU * S | SSOSOSOSSSOSSSSSSSSSSS | 856 |
| 7494 | GGCTU | fU * SmU fA * SmU * S fU * SmG * S fG * SmG * | | |
| | | S fA * SmG * S fG * SmC * STGaNC6T * SmU | | |
| WV- | TAGCUUCUUGUCCAGCUU | T * S fA * SmG fC * SmU * S fU * SmC * S fU * | SSOSSSSSSSOSOSSSSSSSSS | 857 |
| 7495 | UAUTU | SImU * S fG * SmU fC * SmC fA * SmG * S fC * | | |
| | | SmU * S fU * SmU * S fA * SmU * STGaNC6T * | | |
| | | SmU | | |
| WV- | TGUCCAGCUUUAUUGGGA | VPT * S fG * SmU fC * SmC fA * SmG fC * SImU * | SSOSOSOSSSOSSSSSSSSSSS | 858 |
| 7496 | GGCTU | S fU * SmU fA * SmU * S fU * SmG * S fG * SmG | | |
| | | * S fA * SmG * S fG * SmC * STGaNC6T * SmU | | |
| WV- | TAGCUUCUUGUCCAGCUU | VPT * S fA * SmG fC * SmU * S fU * SmC * S fU * | SSOSSSSSSSOSOSSSSSSSSS | 859 |
| 7497 | UAUTU | SImU * S fG * SmU fC * SmC fA * SmG * S fC * | | |
| | | SmU * S fU * SmU * S fA * SmU * STGaNC6T * | | |
| | | SmU | | |
| WV- | TGUCCAGCUUUAUUGGGA | T * S fG * SmU fC * SmC fA * SmG fC * SmU * S | SSOSOSOSSSOSSSSSSSSSSS | 860 |
| 7498 | GGCTU | fU * SmU fA * SmU * S fU * SmG * S fG * SmG * | | |
| | | S fA * SmG * S fG * SmC * SAMC6T * SmU | | |
| WV- | TAGCUUCUUGUCCAGCUU | T * S fA * SmG fC * SmU * S fU * SmC * S fU * | SSOSSSSSSSOSOSSSSSSSSS | 861 |
| 7499 | UAUTU | SmU * S fG * SmU fC * SmC fA * SmG * S fC * | | |
| | | SmU * S fU * SmU * S fA * SmU * SAMC6T * SmU | | |
| WV- | TGUCCAGCUUUAUUGGGA | VPT * S fG * SmU fC * SmC fA * SmG fC * SmU * | SSOSOSOSSSOSSSSSSSSSSS | 862 |
| 7500 | GGCTU | S fU * SmU fA * SmU * S fU * SmG * S fG * SmG | | |
| | | * S fA * SmG * S fG * SmC * SAMC6T * SmU | | |
| WV- | TAGCUUCUUGUCCAGCUU | VPT * S fA * SmG fC * SmU * S fU * SmC * S fU * SSOSSSSSSSOSOSSSSSSSSS | 863 | |
| 7501 | UAUTU | SmU * S fG * SmU fC * SmC fA * SmG * S fC * | | |
| | | SmU * S fU * SmU * S fA * SmU * SAMC6T * SmU | | |
| WV- | TGUCCAGCUUUAUUGGGA | T * S fG * SmU fC * SmC fA * SmG fC * SImU * S | SSOSOSOSSSOSSSSSSSSSSS | 864 |
| 7502 | GGCTU | fU * SmU fA * SmU * S fU * SmG * S fG * SmG * | | |
| | | S fA * SmG * S fG * SmC * SAMC6T * SmU | | |
| WV- | TAGCUUCUUGUCCAGCUU | T * S fA * SmG fC * SmU * S fU * SmC * S fU * | SSOSSSSSSSOSOSSSSSSSSS | 865 |
| 7503 | UAUTU | SImU * S fG * SmU fC * SmC fA * SmG * S fC * | | |
| | | SmU * S fU * SmU * S fA * SmU * SAMC6T * SmU | | |
| WV- | TGUCCAGCUUUAUUGGGA | VPT * S fG * SmU fC * SmC fA * SmG fC * SImU * | SSOSOSOSSSOSSSSSSSSSSS | 866 |
| 7504 | GGCTU | S fU * SmU fA * SmU * S fU * SmG * S fG * SmG | | |
| | | * S fA * SmG * S fG * SmC * SAMC6T * SmU | | |
| WV- | TAGCUUCUUGUCCAGCUU | VPT * S fA * SmG fC * SmU * S fU * SmC * S fU * | SSOSSSSSSSOSOSSSSSSSSS | 867 |
| 7505 | UAUTU | SImU * S fG * SmU fC * SmC fA * SmG * S fC * | | |
| | | SmU * S fU * SmU * S fA * SmU * SAMC6T * SmU | | |
| WV- | TGUCCAGCUUUAUUGGGA | T * S fG * SmU * S fC * SmC * S fA * SmG * S fC * | SSSSSSSSSSSSSSSSSSSSSS | 868 |
| 7521 | GGCTU | SmU * S fU * SmU * S fA * SmU * S fU * SmG * S | | |
| | | fG * SmG * S fA * SmG * S fG * SmC * ST * SmU | | |
| WV- | TAGCUUCUUGUCCAGCUU | T * S fA * SmG * S fC * SmU * S fU * SmC * S fU * | SSSSSSSSSSSSSSSSSSSSSS | 869 |
| 7522 | UAUTU | SmU * S fG * SmU * S fC * SmC * S fA * SmG * S | | |
| | | fC * SmU * S fU * SmU * S fA * SmU * ST * SmU | | |
| WV- | TGUCCAGCUUUAUUGGGA | T * S fG * SmU fC * SmC fA * SmG fC * SmU fU * | SSOSOSOSOSOSOSSSSSSSS | 870 |
| 7523 | GGCTU | SmU fA * SmU fU * SG * SG * SG * SA * SG * SG * | S | |
| | | SC * ST * SmU | | |
| WV- | TAGCUUCUUGUCCAGCTTT | T * S fA * SmG fC * SmU fU * SmC fU * SmU fG * | SSOSOSOSOSOSOSSSSSSSS | 871 |
| 7524 | ATTU | SmU fC * SmC fA * SG * SC * ST * ST * ST * SA * | S | |
| | | ST * ST * SmU | | |
| WV- | TGUCCAGCUUUAUUGGGA | T * S fG * SmU fC * SmC fA * SmG fC * SmU * S | SSOSOSOSSSOSSSSSSSSSSS | 872 |
| 7525 | GGCTU | fU * SmU fA * SmU * S fU * SG * SG * SG * SA * | | |
| | | SG * SG * SC * ST * SmU | | |
| WV- | TAGCUUCUUGUCCAGCTTT | T * S fA * SmG fC * SmU * S fU * SmC * S fU * | SSOSSSSSSSOSOSSSSSSSSS | 873 |
| 7526 | ATTU | SmU * S fG * SmU fC * SmC fA * SG * SC * ST * | | |
| | | ST * ST * SA * ST * ST * SmU | | |
| WV- | TGUCCAGCUUUAUUGGGA | T * S fG * SmU * S fC * SmC * S fA * SmG * S fC * | SSSSSSSSSSSSSSSSSSSSSS | 874 |
| 7527 | GGCTU | SmU * S fU * SmU * S fA * SmU * S fU * SG * SG | | |
| | | * SG * SA * SG * SG * SC * ST * SmU | | |
| WV- | TAGCUUCUUGUCCAGCTTT | T * S fA * SmG * S fC * SmU * S fU * SmC * S fU * | SSSSSSSSSSSSSSSSSSSSSS | 875 |
| 7528 | ATTU | SmU * S fG * SmU * S fC * SmC * S fA * SG * SC * | | |
| | | ST * ST * ST * SA * ST * ST * SmU | | |
| WV- | TGUCCAGCUUUAUUGGGA | T * fG * mUmC * mCmA * mGmC * mUmU * | XXOXOXOXOXOXOXXXXXX | 876 |
| 7540 | GGCTU | mUmA * mU fU * mG * mG * mG * mA * mG * | XXX | |
| | | mG * mC * T * mU | | |
| WV- | TGUCCAGCUUUAUUGGGA | T * mG * mUmC * mCmA * mGmC * mUmU * | XXOXOXOXOXOXOXXXXXX | 877 |
| 7541 | GGCTU | mUmA * mUmU * mG * mG * mG * mA * mG * | XXX | |
| | | mG * mC * T * mU | | |
| WV- | TAGCUUCUUGUCCAGCUU | T * fA * mG fC * mU fU * mC fU * mU fG * mU fC | XXOXOXOXOXOXOXXXXXX | 878 |
| 7542 | UAUTU | * mC fA * mG * fC * mU * fU * mU * fA * mU * T | XXX | |
| | | * mU | | |
| WV- | TAGCUUCUUGUCCAGCUU | T * fA * mGmC * mUmU * mCmU * mUmG * | XXOXOXOXOXOXOXXXXXX | 879 |
| 7543 | UAUTU | mUmC * mC fA * mG * mC * mU * mU * mU * | XXX | |
| | | mA * mU * T * mU | | |
| WV- | TAGCUUCUUGUCCAGCUU | T * mA * mGmC * mUmU * mCmU * mUmG * | XXOXOXOXOXOXOXXXXXX | 880 |
| 7544 | UAUTU | mUmC * mCmA * mG * mC * mU * mU * mU * | XXX | |
| | | mA * mU * T * mU | | |
| WV- | TGUCCAGCUUUAUUGGGA | T * S fGmU * S fCmC * S fAmG * S fCmU * S | SOSOSOSOSOSOSOSOSOS | 881 |
| 7597 | GGCTU | fUmU * S fAmU * S fUmG * S fGmG * S fAmG * S | OSS | |
| | | fGmC * ST * SmU | | |
| WV- | TGUCCAGCUUUAUUGGGA | T * S fG * SmU fC * SmC fA * SmG fC * SmU fU * | SSOSOSOSOSOSOSOSOSO | 882 |
| 7598 | GGCTU | SmU fA * SmU fU * SmG fG * SmG fA * SmG fG * | SOS | |
| | | SmCT * SmU | | |
| WV- | TAGCUUCUUGUCCAGCUU | T * S fAmG * S fCmU * S fUmC * S fUmU * S | SOSOSOSOSOSOSOSOSOS | 883 |
| 7599 | UAUTU | fGmU * S fCmC * S fAmG * S fCmU * S fUmU * S | OSS | |
| | | fAmU * ST * SmU | | |
| WV- | TAGCUUCUUGUCCAGCUU | T * S fA * SmG fC * SmU fU * SmC fU * SmU fG * | SSOSOSOSOSOSOSOSOSO | 884 |
| 7600 | UAUTU | SmU fC * SmC fA * SmG fC * SmU fU * SmU fA * | SOS | |
| | | SmUT * SmU | | |
| WV- | TGUCCAGCUUUAUUGGGA | 5MSdT * fG * mU fC * mC fA * mG fC * mU fU * | XXOXOXOXOXOXOXXXXXX | 885 |
| 7635 | GGCTU | mU fA * mU fU * mG * fG * mG * fA * mG * fG * | XXX | |
| | | mC * T * mU | | |
| WV- | TAGCUUCUUGUCCAGCUU | 5MSdT * fA * mG fC * mU fU * mC fU * mU fG * | XXOXOXOXOXOXOXXXXXX | 886 |
| 7636 | UAUTU | mU fC * mC fA * mG * fC * mU * fU * mU * fA * | XXX | |
| | | mU * T * mU | | |
| WV- | TGUCCAGCUUUAUUGGGA | PO5MSdT * fG * mU fC * mC fA * mG fC * mU fU | XXOXOXOXOXOXOXXXXXX | 887 |
| 7637 | GGCTU | * mU fA * mU fU * mG * fG * mG * fA * mG * fG | XXX | |
| | | * mC * T * mU | | |
| WV- | TAGCUUCUUGUCCAGCUU | PO5MSdT * fA * mG fC * mU fU * mC fU * mU fG | XXOXOXOXOXOXOXXXXXX | 888 |
| 7638 | UAUTU | * mU fC * mC fA * mG * fC * mU * fU * mU * fA | XXX | |
| | | * mU * T * mU | | |
| WV- | TGUCCAGCUUUAUUGGGA | PS5MSdT * fG * mU fC * mC fA * mG fC * mU fU | XXOXOXOXOXOXOXXXXXX | 889 |
| 7639 | GGCTU | * mU fA * mU fU * mG * fG * mG * fA * mG * fG | XXX | |
| | | * mC * T * mU | | |
| WV- | TAGCUUCUUGUCCAGCUU | PS5MSdT * fA * mG fC * mU fU * mC fU * mU fG | XXOXOXOXOXOXOXXXXXX | 890 |
| 7640 | UAUTU | * mU fC * mC fA * mG * fC * mU * fU * mU * fA | XXX | |
| | | * mU * T * mU | | |
| WV- | TGUCCAGCUUUAUUGGGA | PH5MSdT * fG * mU fC * mC fA * mG fC * mU fU | XXOXOXOXOXOXOXXXXXX | 891 |
| 7641 | GGCTU | * mU fA * mU fU * mG * fG * mG * fA * mG * fG | XXX | |
| | | * mC * T * mU | | |
| WV- | TAGCUUCUUGUCCAGCUU | PH5MSdT * fA * mG fC * mU fU * mC fU * mU fG | XXOXOXOXOXOXOXXXXXX | 892 |
| 7642 | UAUTU | * mU fC * mC fA * mG * fC * mU * fU * mU * fA | XXX | |
| | | * mU * T * mU | | |
| WV- | TGUCCAGCUUUAUUGGGA | 5MRdT * fG * mU fC * mC fA * mG fC * mU fU * | XXOXOXOXOXOXOXXXXXX | 893 |
| 7643 | GGCTU | mU fA * mU fU * mG * fG * mG * fA * mG * fG * | XXX | |
| | | mC * T * mU | | |
| WV- | TAGCUUCUUGUCCAGCUU | 5MRdT * fA * mG fC * mU fU * mC fU * mU fG * | XXOXOXOXOXOXOXXXXXX | 894 |
| 7644 | UAUTU | mU fC * mC fA * mG * fC * mU * fU * mU * fA * | XXX | |
| | | mU * T * mU | | |
| WV- | TGUCCAGCUUUAUUGGGA | PO5MRdT * fG * mU fC * mC fA * mG fC * mU fU | XXOXOXOXOXOXOXXXXXX | 895 |
| 7645 | GGCTU | * mU fA * mU fU * mG * fG * mG * fA * mG * fG | XXX | |
| | | * mC * T * mU | | |
| WV- | TAGCUUCUUGUCCAGCUU | PO5MRdT * fA * mG fC * mU fU * mC fU * mU fG | XXOXOXOXOXOXOXXXXXX | 896 |
| 7646 | UAUTU | * mU fC * mC fA * mG * fC * mU * fU * mU * fA | XXX | |
| | | * mU * T * mU | | |
| WV- | TGUCCAGCUUUAUUGGGA | PS5MRdT * fG * mU fC * mC fA * mG fC * mU fU | XXOXOXOXOXOXOXXXXXX | 897 |
| 7647 | GGCTU | * mU fA * mU fU * mG * fG * mG * fA * mG * fG | XXX | |
| | | * mC * T * mU | | |
| WV- | TAGCUUCUUGUCCAGCUU | PS5MRdT * fA * mG fC * mU fU * mC fU * mU fG | XXOXOXOXOXOXOXXXXXX | 898 |
| 7648 | UAUTU | * mU fC * mC fA * mG * fC * mU * fU * mU * fA | XXX | |
| | | * mU * T * mU | | |
| WV- | TGUCCAGCUUUAUUGGGA | PH5MRdT * fG * mU fC * mC fA * mG fC * mU fU | XXOXOXOXOXOXOXXXXXX | 899 |
| 7649 | GGCTU | * mU fA * mU fU * mG * fG * mG * fA * mG * fG | XXX | |
| | | * mC * T * mU | | |
| WV- | TAGCUUCUUGUCCAGCUU | PH5MRdT * fA * mG fC * mU fU * mC fU * mU fG | XXOXOXOXOXOXOXXXXXX | 900 |
| 7650 | UAUTU | * mU fC * mC fA * mG * fC * mU * fU * mU * fA | XXX | |
| | | * mU * T * mU | | |
| WV- | TUUGUCCAGCUUUAUUGG | T * fU * mU fG * mU fC * mC fA * mG fC * mU fU | XXOXOXOXOXOXOXXXXXX | 901 |
| 7660 | GAGTU | * mU fA * mU * fU * mG * fG * mG * fA * mG * T | XXX | |
| | | * mU | | |
| WV- | TCUUGUCCAGCUUUAUUG | T * fC * mU fU * mG fU * mC fC * mA fG * mC fU | XXOXOXOXOXOXOXXXXXX | 902 |
| 7661 | GGATU | * mU fU * mA * fU * mU * fG * mG * fG * mA * T | XXX | |
| | | * mU | | |
| WV- | TUCUUGUCCAGCUUUAUU | T * fU * mC fU * mU fG * mU fC * mC fA * mG fC | XXOXOXOXOXOXOXXXXXX | 903 |
| 7662 | GGGTU | * mU fU * mU * fA * mU * fU * mG * fG * mG * T | XXX | |
| | | * mU | | |
| WV- | TUAGCAGCUUCUUGUCCA | T * fU * mA fG * mC fA * mG fC * mU fU * mC fU | XXOXOXOXOXOXOXXXXXX | 904 |
| 7663 | GCUTU | * mU fG * mU * fC * mC * fA * mG * fC * mU * T | XXX | |
| | | * mU | | |
| WV- | TAUAGCAGCUUCUUGUCC | T * fA * mU fA * mG fC * mA fG * mC fU * mU fC | XXOXOXOXOXOXOXXXXXX | 905 |
| 7664 | AGCTU | * mU fU * mG * fU * mC * fC * mA * fG * mC * T | XXX | |
| | | * mU | | |
| WV- | TCAUAGCAGCUUCUUGUC | T * fC * mA fU * mA fG * mC fA * mG fC * mU fU | XXOXOXOXOXOXOXXXXXX | 906 |
| 7665 | CAGTU | * mC fU * mU * fG * mU * fC * mC * fA * mG * T | XXX | |
| | | * mU | | |
| WV- | TUUGUCCAGCUUUAUUGG | T * S fU * SmU fG * SmU fC * SmC fA * SmG fC | * SSOSOSOSOSOSOSSSSSSSS | 907 |
| 7666 | GAGTU | SmU fU * SmU fA * SmU * S fU * SmG * S fG * | S | |
| | | SmG * S fA * SmG * ST * SmU | | |
| WV- | TCUUGUCCAGCUUUAUUG | T * S fC * SmU fU * SmG fU * SmC fC * SmA fG * | SSOSOSOSOSOSOSSSSSSSS | 908 |
| 7667 | GGATU | SmC fU * SmU fU * SmA * S fU * SmU * S fG * | S | |
| | | SmG * S fG * SmA * ST * SmU | | |
| WV- | TUCUUGUCCAGCUUUAUU | T * S fU * SmC fU * SmU fG * SmU fC * SmC fA * | SSOSOSOSOSOSOSSSSSSSS | 909 |
| 7668 | GGGTU | SmG fC * SmU fU * SmU * S fA * SmU * S fU * | S | |
| | | SmG * S fG * SmG * ST * SmU | | |
| WV- | TUAGCAGCUUCUUGUCCA | T * S fU * SmA fG * SmC fA * SmG fC * SmU fU * | SSOSOSOSOSOSOSSSSSSSS | 910 |
| 7669 | GCUTU | SmC fU * SmU fG * SmU * S fC * SmC * S fA * | S | |
| | | SmG * S fC * SmU * ST * SmU | | |
| WV- | TAUAGCAGCUUCUUGUCC | T * S fA * SmU fA * SmG fC * SmA fG * SmC fU * | SSOSOSOSOSOSOSSSSSSSS | 911 |
| 7670 | AGCTU | SmU fC * SmU fU * SmG * S fU * SmC * S fC * | S | |
| | | SmA * S fG * SmC * ST * SmU | | |
| WV- | TCAUAGCAGCUUCUUGUC | T * S fC * SmA fU * SmA fG * SmC fA * SmG fC * | SSOSOSOSOSOSOSSSSSSSS | 912 |
| 7671 | CAGTU | SmU fU * SmC fU * SmU * S fG * SmU * S fC * | S | |
| | | SmC * S fA * SmG * ST * SmU | | |
| WV- | TGUCCAGCUUUAUUGGGA | T * fG * mU * fC * mC * fA * mG * fC * mU * fU * | XXXXXXXXXXXXXXXXXXXXX | 913 |
| 7672 | GGCTU | mU * fA * mU * fU * mG * fG * mG * fA * mG * | X | |
| | | fG * mC * T * mU | | |
| WV- | TAGCUUCUUGUCCAGCUU | T * fA * mG * fC * mU * fU * mC * fU * mU * fG * | XXXXXXXXXXXXXXXXXXXXX | 914 |
| 7673 | UAUTU | mU * fC * mC * fA * mG * fC * mU * fU * mU * | X | |
| | | fA * mU * T * mU | | |
| WV- | CCAGCTTTATTAGGGACAGC | L001m5Ceo * m5Ceo * Aeo * Geo * m5Ceo * T | OXXXXXXXXXXXXXXXXXXX | 915 |
| 493 | | * T * T * A * T * T * A * G * G * G * Aeo * | | |
| | | m5Ceo * Aeo * Geo * m5Ceo | | |
| WV- | CCAGCTTTATTAGGGACAGC | Mod001L001m5Ceo * m5Ceo * Aeo * Geo * | OXXXXXXXXXXXXXXXXXXX | 916 |
| 495 | | m5Ceo * T * T * T * A * T * T * A * G * G * G * | | |
| | | Aeo * m5Ceo * Aeo * Geo * m5Ceo | | |
| WV- | GGAGCAGCTGCCTCTAGGGA | G * G * A * G * C * A * G * C * T * G * C * C * T * | XXXXXXXXXXXXXXXXXXX | 917 |
| 692 | | C * T * A * G * G * G * A | | |
| WV- | TGGAGCAGCTGCCTCTAGGG | T * G * G * A * G * C * A * G * C * T * G * C * C * | XXXXXXXXXXXXXXXXXXX | 918 |
| 693 | | T * C * T * A * G * G * G | | |
| WV- | TGTTCCTGGAGCAGCTGCCT | T * G * T * T * C * C * T * G * G * A * G * C * A * | XXXXXXXXXXXXXXXXXXX | 919 |
| 694 | | G * C * T * G * C * C * T | | |
| WV- | TCCTTGGCGGTCTTGGTGGC | T * C * C * T * T * G * G * C * G * G * T * C * T * | XXXXXXXXXXXXXXXXXXX | 920 |
| 695 | | T * G * G * T * G * G * C | | |
| WV- | ATCCTTGGCGGTCTTGGTGG | A * T * C * C * T * T * G * G * C * G * G * T * C * | XXXXXXXXXXXXXXXXXXX | 921 |
| 696 | | T * T * G * G * T * G * G | | |
| WV- | CATCCTTGGCGGTCTTGGTG | C * A * T * C * C * T * T * G * G * C * G * G * T * | XXXXXXXXXXXXXXXXXXX | 922 |
| 697 | | C * T * T * G * G * T * G | | |
| WV- | GCATCCTTGGCGGTCTTGGT | G * C * A * T * C * C * T * T * G * G * C * G * G * | XXXXXXXXXXXXXXXXXXX | 923 |
| 698 | | T * C * T * T * G * G * T | | |
| WV- | CTGGCCTGCTGGGCCACCTG | C * T * G * G * C * C * T * G * C * T * G * G * G * | XXXXXXXXXXXXXXXXXXX | 924 |
| 699 | | C * C * A * C * C * T * G | | |
| WV- | GGCGGTCTTGGTGGCGTGCT | G * G * C * G * G * T * C * T * T * G * G * T * G * | XXXXXXXXXXXXXXXXXXX | 925 |
| 700 | | G * C * G * T * G * C * T | | |
| WV- | TGGCGGTCTTGGTGGCGTGC | T * G * G * C * G * G * T * C * T * T * G * G * T * | XXXXXXXXXXXXXXXXXXX | 926 |
| 701 | | G * G * C * G * T * G * C | | |
| WV- | TTGGCGGTCTTGGTGGCGTG | T * T * G * G * C * G * G * T * C * T * T * G * G * | XXXXXXXXXXXXXXXXXXX | 927 |
| 702 | | T * G * G * C * G * T * G | | |
| WV- | CTTGGCGGTCTTGGTGGCGT | C * T * T * G * G * C * G * G * T * C * T * T * G * | XXXXXXXXXXXXXXXXXXX | 928 |
| 703 | | G * T * G * G * C * G * T | | |
| WV- | CCTTGGCGGTCTTGGTGGCG | C * C * T * T * G * G * C * G * G * T * C * T * T * | XXXXXXXXXXXXXXXXXXX | 929 |
| 704 | | G * G * T * G * G * C * G | | |
| WV- | GCCCCTGGCCTGCTGGGCCA | G * C * C * C * C * T * G * G * C * C * T * G * C * | XXXXXXXXXXXXXXXXXXX | 930 |
| 705 | | T * G * G * G * C * C * A | | |
| WV- | GGCAGAGGCCAGGAGCGCCA | G * G * C * A * G * A * G * G * C * C * A * G * G | XXXXXXXXXXXXXXXXXXX | 931 |
| 706 | | * A * G * C * G * C * C * A | | |
| WV- | GAGGCATCCTCGGCCTCTGA | G * A * G * G * C * A * T * C * C * T * C * G * G * | XXXXXXXXXXXXXXXXXXX | 932 |
| 707 | | C * C * T * C * T * G * A | | |
| WV- | GGAGGCATCCTCGGCCTCTG | G * G * A * G * G * C * A * T * C * C * T * C * G * | XXXXXXXXXXXXXXXXXXX | 933 |
| 708 | | G * C * C * T * C * T * G | | |
| WV- | GGGAGGCATCCTCGGCCTCT | G * G * G * A * G * G * C * A * T * C * C * T * C * | XXXXXXXXXXXXXXXXXXX | 934 |
| 709 | | G * G * C * C * T * C * T | | |
| WV- | AGGGAGGCATCCTCGGCCTC | A * G * G * G * A * G * G * C * A * T * C * C * T * | XXXXXXXXXXXXXXXXXXX | 935 |
| 710 | | C * G * G * C * C * T * C | | |
| WV- | AAGGGAGGCATCCTCGGCCT | A * A * G * G * G * A * G * G * C * A * T * C * C | XXXXXXXXXXXXXXXXXXX | 936 |
| 711 | | * T * C * G * G * C * C * T | | |
| WV- | GAAGGGAGGCATCCTCGGCC | G * A * A * G * G * G * A * G * G * C * A * T * C | XXXXXXXXXXXXXXXXXXX | 937 |
| 712 | | * C * T * C * G * G * C * C | | |
| WV- | GGTCTTGGTGGCGTGCTTCA | G * G * T * C * T * T * G * G * T * G * G * C * G * | XXXXXXXXXXXXXXXXXXX | 938 |
| 713 | | T * G * C * T * T * C * A | | |
| WV- | GCGGTCTTGGTGGCGTGCTT | G * C * G * G * T * C * T * T * G * G * T * G * G * | XXXXXXXXXXXXXXXXXXX | 939 |
| 714 | | C * G * T * G * C * T * T | | |
| WV- | GTCTCAGGCAGCCACGGCTG | G * T * C * T * C * A * G * G * C * A * G * C * C * | XXXXXXXXXXXXXXXXXXX | 940 |
| 715 | | A * C * G * G * C * T * G | | |
| WV- | AGGCCAGCATGCCTGGAGGG | A * G * G * C * C * A * G * C * A * T * G * C * C * | XXXXXXXXXXXXXXXXXXX | 941 |
| 716 | | T * G * G * A * G * G * G | | |
| WV- | TGCATCCTTGGCGGTCTTGG | T * G * C * A * T * C * C * T * T * G * G * C * G * | XXXXXXXXXXXXXXXXXXX | 942 |
| 717 | | G * T * C * T * T * G * G | | |
| WV- | GTGCATCCTTGGCGGTCTTG | G * T * G * C * A * T * C * C * T * T * G * G * C * | XXXXXXXXXXXXXXXXXXX | 943 |
| 718 | | G * G * T * C * T * T * G | | |
| WV- | CTGCTGGGCCACCTGGGACT | C * T * G * C * T * G * G * G * C * C * A * C * C * | XXXXXXXXXXXXXXXXXXX | 944 |
| 719 | | T * G * G * G * A * C * T | | |
| WV- | TGAAGCCATCGGTCACCCAG | T * G * A * A * G * C * C * A * T * C * G * G * T * | XXXXXXXXXXXXXXXXXXX | 945 |
| 720 | | C * A * C * C * C * A * G | | |
| WV- | CTGAAGCCATCGGTCACCCA | C * T * G * A * A * G * C * C * A * T * C * G * G * | XXXXXXXXXXXXXXXXXXX | 946 |
| 721 | | T * C * A * C * C * C * A | | |
| WV- | CTTGTCCTTAACGGTGCTCC | C * T * T * G * T * C * C * T * T * A * A * C * G * | XXXXXXXXXXXXXXXXXXX | 947 |
| 722 | | G * T * G * C * T * C * C | | |
| WV- | TGTCCAGCTTTATTGGGAGG | T * G * T * C * C * A * G * C * T * T * T * A * T * | XXXXXXXXXXXXXXXXXXX | 948 |
| 723 | | T * G * G * G * A * G * G | | |
| WV- | TGCCTCTAGGGATGAACTGA | T * G * C * C * T * C * T * A * G * G * G * A * T * | XXXXXXXXXXXXXXXXXXX | 949 |
| 724 | | G * A * A * C * T * G * A | | |
| WV- | CTGCATGGCACCTCTGTTCC | C * T * G * C * A * T * G * G * C * A * C * C * T * | XXXXXXXXXXXXXXXXXXX | 950 |
| 725 | | C * T * G * T * T * C * C | | |
| WV- | GGGCTGCATGGCACCTCTGT | G * G * G * C * T * G * C * A * T * G * G * C * A | XXXXXXXXXXXXXXXXXXX | 951 |
| 726 | | * C * C * T * C * T * G * T | | |
| WV- | CTCTGAAGCTCGGGCAGAGG | C * T * C * T * G * A * A * G * C * T * C * G * G * | XXXXXXXXXXXXXXXXXXX | 952 |
| 727 | | G * C * A * G * A * G * G | | |
| WV- | CCTCTGAAGCTCGGGCAGAG | C * C * T * C * T * G * A * A * G * C * T * C * G * | XXXXXXXXXXXXXXXXXXX | 953 |
| 728 | | G * G * C * A * G * A * G | | |
| WV- | GCCTCTGAAGCTCGGGCAGA | G * C * C * T * C * T * G * A * A * G * C * T * C * | XXXXXXXXXXXXXXXXXXX | 954 |
| 729 | | G * G * G * C * A * G * A | | |
| WV- | CGGCCTCTGAAGCTCGGGCA | C * G * G * C * C * T * C * T * G * A * A * G * C * | XXXXXXXXXXXXXXXXXXX | 955 |
| 730 | | T * C * G * G * G * C * A | | |
| WV- | TCGGCCTCTGAAGCTCGGGC | T * C * G * G * C * C * T * C * T * G * A * A * G * | XXXXXXXXXXXXXXXXXXX | 956 |
| 731 | | C * T * C * G * G * G * C | | |
| WV- | CTCGGCCTCTGAAGCTCGGG | C * T * C * G * G * C * C * T * C * T * G * A * A * | XXXXXXXXXXXXXXXXXXX | 957 |
| 732 | | G * C * T * C * G * G * G | | |
| WV- | CCTCGGCCTCTGAAGCTCGG | C * C * T * C * G * G * C * C * T * C * T * G * A * | XXXXXXXXXXXXXXXXXXX | 958 |
| 733 | | A * G * C * T * C * G * G | | |
| WV- | TCCTCGGCCTCTGAAGCTCG | T * C * C * T * C * G * G * C * C * T * C * T * G * | XXXXXXXXXXXXXXXXXXX | 959 |
| 734 | | A * A * G * C * T * C * G | | |
| WV- | TGCTCAGTGCATCCTTGGCG | T * G * C * T * C * A * G * T * G * C * A * T * C * | XXXXXXXXXXXXXXXXXXX | 960 |
| 735 | | C * T * T * G * G * C * G | | |
| WV- | CCTGGGACTCCTGCACGCTG | C * C * T * G * G * G * A * C * T * C * C * T * G * | XXXXXXXXXXXXXXXXXXX | 961 |
| 736 | | C * A * C * G * C * T * G | | |
| WV- | CCACCTGGGACTCCTGCACG | C * C * A * C * C * T * G * G * G * A * C * T * C * | XXXXXXXXXXXXXXXXXXX | 962 |
| 737 | | C * T * G * C * A * C * G | | |
| WV- | TCGGTCACCCAGCCCCTGGC | T * C * G * G * T * C * A * C * C * C * A * G * C * | XXXXXXXXXXXXXXXXXXX | 963 |
| 738 | | C * C * C * T * G * G * C | | |
| WV- | ATCGGTCACCCAGCCCCTGG | A * T * C * G * G * T * C * A * C * C * C * A * G * | XXXXXXXXXXXXXXXXXXX | 964 |
| 739 | | C * C * C * C * T * G * G | | |
| WV- | CATCGGTCACCCAGCCCCTG | C * A * T * C * G * G * T * C * A * C * C * C * A * | XXXXXXXXXXXXXXXXXXX | 965 |
| 740 | | G * C * C * C * C * T * G | | |
| WV- | CCATCGGTCACCCAGCCCCT | C * C * A * T * C * G * G * T * C * A * C * C * C * | XXXXXXXXXXXXXXXXXXX | 966 |
| 741 | | A * G * C * C * C * C * T | | |
| WV- | GCCATCGGTCACCCAGCCCC | G * C * C * A * T * C * G * G * T * C * A * C * C * | XXXXXXXXXXXXXXXXXXX | 967 |
| 742 | | C * A * G * C * C * C * C | | |
| WV- | AGCCATCGGTCACCCAGCCC | A * G * C * C * A * T * C * G * G * T * C * A * C * | XXXXXXXXXXXXXXXXXXX | 968 |
| 743 | | C * C * A * G * C * C * C | | |
| WV- | TCCAGCTTTATTGGGAGGCC | T * C * C * A * G * C * T * T * T * A * T * T * G * | XXXXXXXXXXXXXXXXXXX | 969 |
| 744 | | G * G * A * G * G * C * C | | |
| WV- | CATCCTCGGCCTCTGAAGCT | C * A * T * C * C * T * C * G * G * C * C * T * C * | XXXXXXXXXXXXXXXXXXX | 970 |
| 745 | | T * G * A * A * G * C * T | | |
| WV- | AGGCATCCTCGGCCTCTGAA | A * G * G * C * A * T * C * C * T * C * G * G * C * | XXXXXXXXXXXXXXXXXXX | 971 |
| 746 | | C * T * C * T * G * A * A | | |
| WV- | TCTTGGTGGCGTGCTTCATG | T * C * T * T * G * G * T * G * G * C * G * T * G * | XXXXXXXXXXXXXXXXXXX | 972 |
| 747 | | C * T * T * C * A * T * G | | |
| WV- | CACGCTGCTCAGTGCATCCT | C * A * C * G * C * T * G * C * T * C * A * G * T * | XXXXXXXXXXXXXXXXXXX | 973 |
| 748 | | G * C * A * T * C * C * T | | |
| WV- | CTCCTGCACGCTGCTCAGTG | C * T * C * C * T * G * C * A * C * G * C * T * G * | XXXXXXXXXXXXXXXXXXX | 974 |
| 749 | | C * T * C * A * G * T * G | | |
| WV- | GGACTCCTGCACGCTGCTCA | G * G * A * C * T * C * C * T * G * C * A * C * G * | XXXXXXXXXXXXXXXXXXX | 975 |
| 750 | | C * T * G * C * T * C * A | | |
| WV- | GGGACTCCTGCACGCTGCTC | G * G * G * A * C * T * C * C * T * G * C * A * C * | XXXXXXXXXXXXXXXXXXX | 976 |
| 751 | | G * C * T * G * C * T * C | | |
| WV- | TGGGACTCCTGCACGCTGCT | T * G * G * G * A * C * T * C * C * T * G * C * A * | XXXXXXXXXXXXXXXXXXX | 977 |
| 752 | | C * G * C * T * G * C * T | | |
| WV- | AGGTCTCAGGCAGCCACGGC | A * G * G * T * C * T * C * A * G * G * C * A * G * | XXXXXXXXXXXXXXXXXXX | 978 |
| 753 | | C * C * A * C * G * G * C | | |
| WV- | GAGGTCTCAGGCAGCCACGG | G * A * G * G * T * C * T * C * A * G * G * C * A * | XXXXXXXXXXXXXXXXXXX | 979 |
| 754 | | G * C * C * A * C * G * G | | |
| WV- | TGAGGTCTCAGGCAGCCACG | T * G * A * G * G * T * C * T * C * A * G * G * C * | XXXXXXXXXXXXXXXXXXX | 980 |
| 755 | | A * G * C * C * A * C * G | | |
| WV- | CCTGGAGATTGCAGGACCCA | C * C * T * G * G * A * G * A * T * T * G * C * A * | XXXXXXXXXXXXXXXXXXX | 981 |
| 756 | | G * G * A * C * C * C * A | | |
| WV- | GCCCTGGAGATTGCAGGACC | G * C * C * C * T * G * G * A * G * A * T * T * G * | XXXXXXXXXXXXXXXXXXX | 982 |
| 757 | | C * A * G * G * A * C * C | | |
| WV- | CCAGGAGCGCCAGGAGGGCA | C * C * A * G * G * A * G * C * G * C * C * A * G | XXXXXXXXXXXXXXXXXXX | 983 |
| 758 | | * G * A * G * G * G * C * A | | |
| WV- | CGTGCTTCATGTAACCCTGC | C * G * T * G * C * T * T * C * A * T * G * T * A * | XXXXXXXXXXXXXXXXXXX | 984 |
| 759 | | A * C * C * C * T * G * C | | |
| WV- | TGGTCTGACCTCAGGGTCCA | T * G * G * T * C * T * G * A * C * C * T * C * A * | XXXXXXXXXXXXXXXXXXX | 985 |
| 760 | | G * G * G * T * C * C * A | | |
| WV- | TTGGTCTGACCTCAGGGTCC | T * T * G * G * T * C * T * G * A * C * C * T * C * | XXXXXXXXXXXXXXXXXXX | 986 |
| 761 | | A * G * G * G * T * C * C | | |
| WV- | AAGTTGGTCTGACCTCAGGG | A * A * G * T * T * G * G * T * C * T * G * A * C * | XXXXXXXXXXXXXXXXXXX | 987 |
| 762 | | C * T * C * A * G * G * G | | |
| WV- | TGAAGTTGGTCTGACCTCAG | T * G * A * A * G * T * T * G * G * T * C * T * G * | XXXXXXXXXXXXXXXXXXX | 988 |
| 763 | | A * C * C * T * C * A * G | | |
| WV- | CACGGCTGAAGTTGGTCTGA | C * A * C * G * G * C * T * G * A * A * G * T * T * | XXXXXXXXXXXXXXXXXXX | 989 |
| 764 | | G * G * T * C * T * G * A | | |
| WV- | CCACGGCTGAAGTTGGTCTG | C * C * A * C * G * G * C * T * G * A * A * G * T * | XXXXXXXXXXXXXXXXXXX | 990 |
| 765 | | T * G * G * T * C * T * G | | |
| WV- | GCCACGGCTGAAGTTGGTCT | G * C * C * A * C * G * G * C * T * G * A * A * G * | XXXXXXXXXXXXXXXXXXX | 991 |
| 766 | | T * T * G * G * T * C * T | | |
| WV- | AGCCACGGCTGAAGTTGGTC | A * G * C * C * A * C * G * G * C * T * G * A * A * | XXXXXXXXXXXXXXXXXXX | 992 |
| 767 | | G * T * T * G * G * T * C | | |
| WV- | GTCTTGGTGGCGTGCTTCAT | G * T * C * T * T * G * G * T * G * G * C * G * T * | XXXXXXXXXXXXXXXXXXX | 993 |
| 768 | | G * C * T * T * C * A * T | | |
| WV- | CAGTGCATCCTTGGCGGTCT | C * A * G * T * G * C * A * T * C * C * T * T * G * | XXXXXXXXXXXXXXXXXXX | 994 |
| 769 | | G * C * G * G * T * C * T | | |
| WV- | CTGCCTCTAGGGATGAACTG | C * T * G * C * C * T * C * T * A * G * G * G * A * | XXXXXXXXXXXXXXXXXXX | 995 |
| 770 | | T * G * A * A * C * T * G | | |
| WV- | GGCATCCTCGGCCTCTGAAG | G * G * C * A * T * C * C * T * C * G * G * C * C * | XXXXXXXXXXXXXXXXXXX | 996 |
| 771 | | T * C * T * G * A * A * G | | |
| WV- | TTGGTGGCGTGCTTCATGTA | T * T * G * G * T * G * G * C * G * T * G * C * T * | XXXXXXXXXXXXXXXXXXX | 997 |
| 772 | | T * C * A * T * G * T * A | | |
| WV- | GCGTGCTTCATGTAACCCTG | G * C * G * T * G * C * T * T * C * A * T * G * T * | XXXXXXXXXXXXXXXXXXX | 998 |
| 773 | | A * A * C * C * C * T * G | | |
| WV- | TGAGAAGGGAGGCATCCTCG | T * G * A * G * A * A * G * G * G * A * G * G * C | XXXXXXXXXXXXXXXXXXX | 999 |
| 774 | | * A * T * C * C * T * C * G | | |
| WV- | GCTGAAGTTGGTCTGACCTC | G * C * T * G * A * A * G * T * T * G * G * T * C * | XXXXXXXXXXXXXXXXXXX | 1000 |
| 775 | | T * G * A * C * C * T * C | | |
| WV- | GGGCCTCCCAAGGCAAACCC | G * G * G * C * C * T * C * C * C * A * A * G * G * | XXXXXXXXXXXXXXXXXXX | 1001 |
| 776 | | C * A * A * A * C * C * C | | |
| WV- | GTTTATGCCCCTGGGCCTGA | G * T * T * T * A * T * G * C * C * C * C * T * G * | XXXXXXXXXXXXXXXXXXX | 1002 |
| 777 | | G * G * C * C * T * G * A | | |
| WV- | AACCTTAGCTGGGTCTGCCA | A * A * C * C * T * T * A * G * C * T * G * G * G * | XXXXXXXXXXXXXXXXXXX | 1003 |
| 778 | | T * C * T * G * C * C * A | | |
| WV- | CACCCATTGGGACTGGGATC | C * A * C * C * C * A * T * T * G * G * G * A * C * | XXXXXXXXXXXXXXXXXXX | 1004 |
| 779 | | T * G * G * G * A * T * C | | |
| WV- | CTCCTGCTTGACCACCCATT | C * T * C * C * T * G * C * T * T * G * A * C * C * | XXXXXXXXXXXXXXXXXXX | 1005 |
| 780 | | A * C * C * C * A * T * T | | |
| WV- | GCTCCTGCTTGACCACCCAT | G * C * T * C * C * T * G * C * T * T * G * A * C * | XXXXXXXXXXXXXXXXXXX | 1006 |
| 781 | | C * A * C * C * C * A * T | | |
| WV- | TGGGCTCCTGCTTGACCACC | T * G * G * G * C * T * C * C * T * G * C * T * T * | XXXXXXXXXXXXXXXXXXX | 1007 |
| 782 | | G * A * C * C * A * C * C | | |
| WV- | GCCTGACAAAGGCCCTGTGA | G * C * C * T * G * A * C * A * A * A * G * G * C * | XXXXXXXXXXXXXXXXXXX | 1008 |
| 783 | | C * C * T * G * T * G * A | | |
| WV- | TCCTTGCAGGAACCCCAGCA | T * C * C * T * T * G * C * A * G * G * A * A * C * | XXXXXXXXXXXXXXXXXXX | 1009 |
| 784 | | C * C * C * A * G * C * A | | |
| WV- | ACACCACCCTCTCAACTTCA | A * C * A * C * C * A * C * C * C * T * C * T * C * | XXXXXXXXXXXXXXXXXXX | 1010 |
| 785 | | A * A * C * T * T * C * A | | |
| WV- | ACACCCATGTCCCCACTGGA | A * C * A * C * C * C * A * T * G * T * C * C * C * | XXXXXXXXXXXXXXXXXXX | 1011 |
| 786 | | C * A * C * T * G * G * A | | |
| WV- | TGAGAACTCCTCTGTAGGCA | T * G * A * G * A * A * C * T * C * C * T * C * T * | XXXXXXXXXXXXXXXXXXX | 1012 |
| 787 | | G * T * A * G * G * C * A | | |
| WV- | GGAGCAGCTGCCTCTAGGGA | mG * mG * mA * mG * mC * A * G * C * T * G * | XXXXXXXXXXXXXXXXXXX | 1013 |
| 788 | | C * C * T * C * T * A * G * G * G * A | | |
| WV- | UGGAGCAGCTGCCTCTAGGG | mU * mG * mG * mA * mG * C * A * G * C * T * | XXXXXXXXXXXXXXXXXXX | 1014 |
| 789 | | G * C * C * T * C * T * A * G * G * G | | |
| WV- | UGUUCCTGGAGCAGCTGCCT | mU * mG * mU * mU * mC * C * T * G * G * A * | XXXXXXXXXXXXXXXXXXX | 1015 |
| 790 | | G * C * A * G * C * T * G * C * C * T | | |
| WV- | UCCUUGGCGGTCTTGGTGGC | mU * mC * mC * mU * mU * G * G * C * G * G * | XXXXXXXXXXXXXXXXXXX | 1016 |
| 791 | | T * C * T * T * G * G * T * G * G * C | | |
| WV- | AUCCUTGGCGGTCTTGGTGG | mA * mU * mC * mC * mU * T * G * G * C * G * | XXXXXXXXXXXXXXXXXXX | 1017 |
| 792 | | G * T * C * T * T * G * G * T * G * G | | |
| WV- | CAUCCTTGGCGGTCTTGGTG | mC * mA * mU * mC * mC * T * T * G * G * C * | XXXXXXXXXXXXXXXXXXX | 1018 |
| 793 | | G * G * T * C * T * T * G * G * T * G | | |
| WV- | GCAUCCTTGGCGGTCTTGGT | mG * mC * mA * mU * mC * C * T * T * G * G * | XXXXXXXXXXXXXXXXXXX | 1019 |
| 794 | | C * G * G * T * C * T * T * G * G * T | | |
| WV- | CUGGCCTGCTGGGCCACCTG | mC * mU * mG * mG * mC * C * T * G * C * T * | XXXXXXXXXXXXXXXXXXX | 1020 |
| 795 | | G * G * G * C * C * A * C * C * T * G | | |
| WV- | GGCGGTCTTGGTGGCGTGCT | mG * mG * mC * mG * mG * T * C * T * T * G * | XXXXXXXXXXXXXXXXXXX | 1021 |
| 796 | | G * T * G * G * C * G * T * G * C * T | | |
| WV- | UGGCGGTCTTGGTGGCGTGC | mU * mG * mG * mC * mG * G * T * C * T * T * | XXXXXXXXXXXXXXXXXXX | 1022 |
| 797 | | G * G * T * G * G * C * G * T * G * C | | |
| WV- | UUGGCGGTCTTGGTGGCGTG | mU * mU * mG * mG * mC * G * G * T * C * T * | XXXXXXXXXXXXXXXXXXX | 1023 |
| 798 | | T * G * G * T * G * G * C * G * T * G | | |
| WV- | CUUGGCGGTCTTGGTGGCGT | mC * mU * mU * mG * mG * C * G * G * T * C * | XXXXXXXXXXXXXXXXXXX | 1024 |
| 799 | | T * T * G * G * T * G * G * C * G * T | | |
| WV- | CCUUGGCGGTCTTGGTGGCG | mC * mC * mU * mU * mG * G * C * G * G * T * | XXXXXXXXXXXXXXXXXXX | 1025 |
| 800 | | C * T * T * G * G * T * G * G * C * G | | |
| WV- | GCCCCTGGCCTGCTGGGCCA | mG * mC * mC * mC * mC * T * G * G * C * C * T | XXXXXXXXXXXXXXXXXXX | 1026 |
| 801 | | * G * C * T * G * G * G * C * C * A | | |
| WV- | GGCAGAGGCCAGGAGCGCCA | mG * mG * mC * mA * mG * A * G * G * C * C * | XXXXXXXXXXXXXXXXXXX | 1027 |
| 802 | | A * G * G * A * G * C * G * C * C * A | | |
| WV- | GAGGCATCCTCGGCCTCTGA | mG * mA * mG * mG * mC * A * T * C * C * T * | XXXXXXXXXXXXXXXXXXX | 1028 |
| 803 | | C * G * G * C * C * T * C * T * G * A | | |
| WV- | GGAGGCATCCTCGGCCTCTG | mG * mG * mA * mG * mG * C * A * T * C * C * | XXXXXXXXXXXXXXXXXXX | 1029 |
| 804 | | T * C * G * G * C * C * T * C * T * G | | |
| WV- | GGGAGGCATCCTCGGCCTCT | mG * mG * mG * mA * mG * G * C * A * T * C * | XXXXXXXXXXXXXXXXXXX | 1030 |
| 805 | | C * T * C * G * G * C * C * T * C * T | | |
| WV- | AGGGAGGCATCCTCGGCCTC | mA * mG * mG * mG * mA * G * G * C * A * T * | XXXXXXXXXXXXXXXXXXX | 1031 |
| 806 | | C * C * T * C * G * G * C * C * T * C | | |
| WV- | AAGGGAGGCATCCTCGGCCT | mA * mA * mG * mG * mG * A * G * G * C * A * | XXXXXXXXXXXXXXXXXXX | 1032 |
| 807 | | T * C * C * T * C * G * G * C * C * T | | |
| WV- | GAAGGGAGGCATCCTCGGCC | mG * mA * mA * mG * mG * G * A * G * G * C * | XXXXXXXXXXXXXXXXXXX | 1033 |
| 808 | | A * T * C * C * T * C * G * G * C * C | | |
| WV- | GGUCUTGGTGGCGTGCTTCA | mG * mG * mU * mC * mU * T * G * G * T * G * | XXXXXXXXXXXXXXXXXXX | 1034 |
| 809 | | G * C * G * T * G * C * T * T * C * A | | |
| WV- | GCGGUCTTGGTGGCGTGCTT | mG * mC * mG * mG * mU * C * T * T * G * G * | XXXXXXXXXXXXXXXXXXX | 1035 |
| 810 | | T * G * G * C * G * T * G * C * T * T | | |
| WV- | GUCUCAGGCAGCCACGGCTG | mG * mU * mC * mU * mC * A * G * G * C * A * | XXXXXXXXXXXXXXXXXXX | 1036 |
| 811 | | G * C * C * A * C * G * G * C * T * G | | |
| WV- | AGGCCAGCATGCCTGGAGGG | mA * mG * mG * mC * mC * A * G * C * A * T * | XXXXXXXXXXXXXXXXXXX | 1037 |
| 812 | | G * C * C * T * G * G * A * G * G * G | | |
| WV- | UGCAUCCTTGGCGGTCTTGG | mU * mG * mC * mA * mU * C * C * T * T * G * | XXXXXXXXXXXXXXXXXXX | 1038 |
| 813 | | G * C * G * G * T * C * T * T * G * G | | |
| WV- | GUGCATCCTTGGCGGTCTTG | mG * mU * mG * mC * mA * T * C * C * T * T * | XXXXXXXXXXXXXXXXXXX | 1039 |
| 814 | | G * G * C * G * G * T * C * T * T * G | | |
| WV- | CUGCUGGGCCACCTGGGACT | mC * mU * mG * mC * mU * G * G * G * C * C * | XXXXXXXXXXXXXXXXXXX | 1040 |
| 815 | | A * C * C * T * G * G * G * A * C * T | | |
| WV- | UGAAGCCATCGGTCACCCAG | mU * mG * mA * mA * mG * C * C * A * T * C * | XXXXXXXXXXXXXXXXXXX | 1041 |
| 816 | | G * G * T * C * A * C * C * C * A * G | | |
| WV- | CUGAAGCCATCGGTCACCCA | mC * mU * mG * mA * mA * G * C * C * A * T * | XXXXXXXXXXXXXXXXXXX | 1042 |
| 817 | | C * G * G * T * C * A * C * C * C * A | | |
| WV- | CUUGUCCTTAACGGTGCTCC | mC * mU * mU * mG * mU * C * C * T * T * A * | XXXXXXXXXXXXXXXXXXX | 1043 |
| 818 | | A * C * G * G * T * G * C * T * C * C | | |
| WV- | UGUCCAGCTTTATTGGGAGG | mU * mG * mU * mC * mC * A * G * C * T * T * | XXXXXXXXXXXXXXXXXXX | 1044 |
| 819 | | T * A * T * T * G * G * G * A * G * G | | |
| WV- | UGCCUCTAGGGATGAACTGA | mU * mG * mC * mC * mU * C * T * A * G * G * | XXXXXXXXXXXXXXXXXXX | 1045 |
| 820 | | G * A * T * G * A * A * C * T * G * A | | |
| WV- | CUGCATGGCACCTCTGTTCC | mC * mU * mG * mC * mA * T * G * G * C * A * | XXXXXXXXXXXXXXXXXXX | 1046 |
| 821 | | C * C * T * C * T * G * T * T * C * C | | |
| WV- | GGGCUGCATGGCACCTCTGT | mG * mG * mG * mC * mU * G * C * A * T * G * | XXXXXXXXXXXXXXXXXXX | 1047 |
| 822 | | G * C * A * C * C * T * C * T * G * T | | |
| WV- | CUCUGAAGCTCGGGCAGAGG | mC * mU * mC * mU * mG * A * A * G * C * T * | XXXXXXXXXXXXXXXXXXX | 1048 |
| 823 | | C * G * G * G * C * A * G * A * G * G | | |
| WV- | CCUCUGAAGCTCGGGCAGAG | mC * mC * mU * mC * mU * G * A * A * G * C * | XXXXXXXXXXXXXXXXXXX | 1049 |
| 824 | | T * C * G * G * G * C * A * G * A * G | | |
| WV- | GCCUCTGAAGCTCGGGCAGA | mG * mC * mC * mU * mC * T * G * A * A * G * | XXXXXXXXXXXXXXXXXXX | 1050 |
| 825 | | C * T * C * G * G * G * C * A * G * A | | |
| WV- | CGGCCTCTGAAGCTCGGGCA | mC * mG * mG * mC * mC * T * C * T * G * A * | XXXXXXXXXXXXXXXXXXX | 1051 |
| 826 | | A * G * C * T * C * G * G * G * C * A | | |
| WV- | UCGGCCTCTGAAGCTCGGGC | mU * mC * mG * mG * mC * C * T * C * T * G * | XXXXXXXXXXXXXXXXXXX | 1052 |
| 827 | | A * A * G * C * T * C * G * G * G * C | | |
| WV- | CUCGGCCTCTGAAGCTCGGG | mC * mU * mC * mG * mG * C * C * T * C * T * | XXXXXXXXXXXXXXXXXXX | 1053 |
| 828 | | G * A * A * G * C * T * C * G * G * G | | |
| WV- | CCUCGGCCTCTGAAGCTCGG | mC * mC * mU * mC * mG * G * C * C * T * C * T | XXXXXXXXXXXXXXXXXXX | 1054 |
| 829 | | * G * A * A * G * C * T * C * G * G | | |
| WV- | UCCUCGGCCTCTGAAGCTCG | mU * mC * mC * mU * mC * G * G * C * C * T * | XXXXXXXXXXXXXXXXXXX | 1055 |
| 830 | | C * T * G * A * A * G * C * T * C * G | | |
| WV- | UGCUCAGTGCATCCTTGGCG | mU * mG * mC * mU * mC * A * G * T * G * C * | XXXXXXXXXXXXXXXXXXX | 1056 |
| 831 | | A * T * C * C * T * T * G * G * C * G | | |
| WV- | CCUGGGACTCCTGCACGCTG | mC * mC * mU * mG * mG * G * A * C * T * C * | XXXXXXXXXXXXXXXXXXX | 1057 |
| 832 | | C * T * G * C * A * C * G * C * T * G | | |
| WV- | CCACCTGGGACTCCTGCACG | mC * mC * mA * mC * mC * T * G * G * G * A * | XXXXXXXXXXXXXXXXXXX | 1058 |
| 833 | | C * T * C * C * T * G * C * A * C * G | | |
| WV- | UCGGUCACCCAGCCCCTGGC | mU * mC * mG * mG * mU * C * A * C * C * C * | XXXXXXXXXXXXXXXXXXX | 1059 |
| 834 | | A * G * C * C * C * C * T * G * G * C | | |
| WV- | AUCGGTCACCCAGCCCCTGG | mA * mU * mC * mG * mG * T * C * A * C * C * | XXXXXXXXXXXXXXXXXXX | 1060 |
| 835 | | C * A * G * C * C * C * C * T * G * G | | |
| WV- | CAUCGGTCACCCAGCCCCTG | mC * mA * mU * mC * mG * G * T * C * A * C * | XXXXXXXXXXXXXXXXXXX | 1061 |
| 836 | | C * C * A * G * C * C * C * C * T * G | | |
| WV- | CCAUCGGTCACCCAGCCCCT | mC * mC * mA * mU * mC * G * G * T * C * A * | XXXXXXXXXXXXXXXXXXX | 1062 |
| 837 | | C * C * C * A * G * C * C * C * C * T | | |
| WV- | GCCAUCGGTCACCCAGCCCC | mG * mC * mC * mA * mU * C * G * G * T * C * | XXXXXXXXXXXXXXXXXXX | 1063 |
| 838 | | A * C * C * C * A * G * C * C * C * C | | |
| WV- | AGCCATCGGTCACCCAGCCC | mA * mG * mC * mC * mA * T * C * G * G * T * | XXXXXXXXXXXXXXXXXXX | 1064 |
| 839 | | C * A * C * C * C * A * G * C * C * C | | |
| WV- | UCCAGCTTTATTGGGAGGCC | mU * mC * mC * mA * mG * C * T * T * T * A * T | XXXXXXXXXXXXXXXXXXX | 1065 |
| 840 | | * T * G * G * G * A * G * G * C * C | | |
| WV- | CAUCCTCGGCCTCTGAAGCT | mC * mA * mU * mC * mC * T * C * G * G * C * | XXXXXXXXXXXXXXXXXXX | 1066 |
| 841 | | C * T * C * T * G * A * A * G * C * T | | |
| WV- | AGGCATCCTCGGCCTCTGAA | mA * mG * mG * mC * mA * T * C * C * T * C * | XXXXXXXXXXXXXXXXXXX | 1067 |
| 842 | | G * G * C * C * T * C * T * G * A * A | | |
| WV- | UCUUGGTGGCGTGCTTCATG | mU * mC * mU * mU * mG * G * T * G * G * C * | XXXXXXXXXXXXXXXXXXX | 1068 |
| 843 | | G * T * G * C * T * T * C * A * T * G | | |
| WV- | CACGCTGCTCAGTGCATCCT | mC * mA * mC * mG * mC * T * G * C * T * C * A | XXXXXXXXXXXXXXXXXXX | 1069 |
| 844 | | * G * T * G * C * A * T * C * C * T | | |
| WV- | CUCCUGCACGCTGCTCAGTG | mC * mU * mC * mC * mU * G * C * A * C * G * | XXXXXXXXXXXXXXXXXXX | 1070 |
| 845 | | C * T * G * C * T * C * A * G * T * G | | |
| WV- | GGACUCCTGCACGCTGCTCA | mG * mG * mA * mC * mU * C * C * T * G * C * | XXXXXXXXXXXXXXXXXXX | 1071 |
| 846 | | A * C * G * C * T * G * C * T * C * A | | |
| WV- | GGGACTCCTGCACGCTGCTC | mG * mG * mG * mA * mC * T * C * C * T * G * | XXXXXXXXXXXXXXXXXXX | 1072 |
| 847 | | C * A * C * G * C * T * G * C * T * C | | |
| WV- | UGGGACTCCTGCACGCTGCT | mU * mG * mG * mG * mA * C * T * C * C * T * | XXXXXXXXXXXXXXXXXXX | 1073 |
| 848 | | G * C * A * C * G * C * T * G * C * T | | |
| WV- | AGGUCTCAGGCAGCCACGGC | mA * mG * mG * mU * mC * T * C * A * G * G * | XXXXXXXXXXXXXXXXXXX | 1074 |
| 849 | | C * A * G * C * C * A * C * G * G * C | | |
| WV- | GAGGUCTCAGGCAGCCACGG | mG * mA * mG * mG * mU * C * T * C * A * G * | XXXXXXXXXXXXXXXXXXX | 1075 |
| 850 | | G * C * A * G * C * C * A * C * G * G | | |
| WV- | UGAGGTCTCAGGCAGCCACG | mU * mG * mA * mG * mG * T * C * T * C * A * | XXXXXXXXXXXXXXXXXXX | 1076 |
| 851 | | G * G * C * A * G * C * C * A * C * G | | |
| WV- | CCUGGAGATTGCAGGACCCA | mC * mC * mU * mG * mG * A * G * A * T * T * | XXXXXXXXXXXXXXXXXXX | 1077 |
| 852 | | G * C * A * G * G * A * C * C * C * A | | |
| WV- | GCCCUGGAGATTGCAGGACC | mG * mC * mC * mC * mU * G * G * A * G * A * | XXXXXXXXXXXXXXXXXXX | 1078 |
| 853 | | T * T * G * C * A * G * G * A * C * C | | |
| WV- | CCAGGAGCGCCAGGAGGGCA | mC * mC * mA * mG * mG * A * G * C * G * C * | XXXXXXXXXXXXXXXXXXX | 1079 |
| 854 | | C * A * G * G * A * G * G * G * C * A | | |
| WV- | CGUGCTTCATGTAACCCTGC | mC * mG * mU * mG * mC * T * T * C * A * T * | XXXXXXXXXXXXXXXXXXX | 1080 |
| 855 | | G * T * A * A * C * C * C * T * G * C | | |
| WV- | UGGUCTGACCTCAGGGTCCA | mU * mG * mG * mU * mC * T * G * A * C * C * | XXXXXXXXXXXXXXXXXXX | 1081 |
| 856 | | T * C * A * G * G * G * T * C * C * A | | |
| WV- | UUGGUCTGACCTCAGGGTCC | mU * mU * mG * mG * mU * C * T * G * A * C * | XXXXXXXXXXXXXXXXXXX | 1082 |
| 857 | | C * T * C * A * G * G * G * T * C * C | | |
| WV- | AAGUUGGTCTGACCTCAGGG | mA * mA * mG * mU * mU * G * G * T * C * T * | XXXXXXXXXXXXXXXXXXX | 1083 |
| 858 | | G * A * C * C * T * C * A * G * G * G | | |
| WV- | UGAAGTTGGTCTGACCTCAG | mU * mG * mA * mA * mG * T * T * G * G * T * | XXXXXXXXXXXXXXXXXXX | 1084 |
| 859 | | C * T * G * A * C * C * T * C * A * G | | |
| WV- | CACGGCTGAAGTTGGTCTGA | mC * mA * mC * mG * mG * C * T * G * A * A * | XXXXXXXXXXXXXXXXXXX | 1085 |
| 860 | | G * T * T * G * G * T * C * T * G * A | | |
| WV- | CCACGGCTGAAGTTGGTCTG | mC * mC * mA * mC * mG * G * C * T * G * A * | XXXXXXXXXXXXXXXXXXX | 1086 |
| 861 | | A * G * T * T * G * G * T * C * T * G | | |
| WV- | GCCACGGCTGAAGTTGGTCT | mG * mC * mC * mA * mC * G * G * C * T * G * | XXXXXXXXXXXXXXXXXXX | 1087 |
| 862 | | A * A * G * T * T * G * G * T * C * T | | |
| WV- | AGCCACGGCTGAAGTTGGTC | mA * mG * mC * mC * mA * C * G * G * C * T * | XXXXXXXXXXXXXXXXXXX | 1088 |
| 863 | | G * A * A * G * T * T * G * G * T * C | | |
| WV- | GUCUUGGTGGCGTGCTTCAT | mG * mU * mC * mU * mU * G * G * T * G * G * | XXXXXXXXXXXXXXXXXXX | 1089 |
| 864 | | C * G * T * G * C * T * T * C * A * T | | |
| WV- | CAGUGCATCCTTGGCGGTCT | mC * mA * mG * mU * mG * C * A * T * C * C * | XXXXXXXXXXXXXXXXXXX | 1090 |
| 865 | | T * T * G * G * C * G * G * T * C * T | | |
| WV- | CUGCCTCTAGGGATGAACTG | mC * mU * mG * mC * mC * T * C * T * A * G * | XXXXXXXXXXXXXXXXXXX | 1091 |
| 866 | | G * G * A * T * G * A * A * C * T * G | | |
| WV- | GGCAUCCTCGGCCTCTGAAG | mG * mG * mC * mA * mU * C * C * T * C * G * | XXXXXXXXXXXXXXXXXXX | 1092 |
| 867 | | G * C * C * T * C * T * G * A * A * G | | |
| WV- | UUGGUGGCGTGCTTCATGTA | mU * mU * mG * mG * mU * G * G * C * G * T * | XXXXXXXXXXXXXXXXXXX | 1093 |
| 868 | | G * C * T * T * C * A * T * G * T * A | | |
| WV- | GCGUGCTTCATGTAACCCTG | mG * mC * mG * mU * mG * C * T * T * C * A * | XXXXXXXXXXXXXXXXXXX | 1094 |
| 869 | | T * G * T * A * A * C * C * C * T * G | | |
| WV- | UGAGAAGGGAGGCATCCTCG | mU * mG * mA * mG * mA * A * G * G * G * A * | XXXXXXXXXXXXXXXXXXX | 1095 |
| 870 | | G * G * C * A * T * C * C * T * C * G | | |
| WV- | GCUGAAGTTGGTCTGACCTC | mG * mC * mU * mG * mA * A * G * T * T * G * | XXXXXXXXXXXXXXXXXXX | 1096 |
| 871 | | G * T * C * T * G * A * C * C * T * C | | |
| WV- | GGGCCTCCCAAGGCAAACCC | mG * mG * mG * mC * mC * T * C * C * C * A * | XXXXXXXXXXXXXXXXXXX | 1097 |
| 872 | | A * G * G * C * A * A * A * C * C * C | | |
| WV- | GUUUATGCCCCTGGGCCTGA | mG * mU * mU * mU * mA * T * G * C * C * C * | XXXXXXXXXXXXXXXXXXX | 1098 |
| 873 | | C * T * G * G * G * C * C * T * G * A | | |
| WV- | AACCUTAGCTGGGTCTGCCA | mA * mA * mC * mC * mU * T * A * G * C * T * | XXXXXXXXXXXXXXXXXXX | 1099 |
| 874 | | G * G * G * T * C * T * G * C * C * A | | |
| WV- | CACCCATTGGGACTGGGATC | mC * mA * mC * mC * mC * A * T * T * G * G * | XXXXXXXXXXXXXXXXXXX | 1100 |
| 875 | | G * A * C * T * G * G * G * A * T * C | | |
| WV- | CUCCUGCTTGACCACCCATT | mC * mU * mC * mC * mU * G * C * T * T * G * | XXXXXXXXXXXXXXXXXXX | 1101 |
| 876 | | A * C * C * A * C * C * C * A * T * T | | |
| WV- | GCUCCTGCTTGACCACCCAT | mG * mC * mU * mC * mC * T * G * C * T * T * G | XXXXXXXXXXXXXXXXXXX | 1102 |
| 877 | | * A * C * C * A * C * C * C * A * T | | |
| WV- | UGGGCTCCTGCTTGACCACC | mU * mG * mG * mG * mC * T * C * C * T * G * | XXXXXXXXXXXXXXXXXXX | 1103 |
| 878 | | C * T * T * G * A * C * C * A * C * C | | |
| WV- | GCCUGACAAAGGCCCTGTGA | mG * mC * mC * mU * mG * A * C * A * A * A * | XXXXXXXXXXXXXXXXXXX | 1104 |
| 879 | | G * G * C * C * C * T * G * T * G * A | | |
| WV- | UCCUUGCAGGAACCCCAGCA | mU * mC * mC * mU * mU * G * C * A * G * G * | XXXXXXXXXXXXXXXXXXX | 1105 |
| 880 | | A * A * C * C * C * C * A * G * C * A | | |
| WV- | ACACCACCCTCTCAACTTCA | mA * mC * mA * mC * mC * A * C * C * C * T * C | XXXXXXXXXXXXXXXXXXX | 1106 |
| 881 | | * T * C * A * A * C * T * T * C * A | | |
| WV- | ACACCCATGTCCCCACTGGA | mA * mC * mA * mC * mC * C * A * T * G * T * C | XXXXXXXXXXXXXXXXXXX | 1107 |
| 882 | | * C * C * C * A * C * T * G * G * A | | |
| WV- | UGAGAACTCCTCTGTAGGCA | mU * mG * mA * mG * mA * A * C * T * C * C * | XXXXXXXXXXXXXXXXXXX | 1108 |
| 883 | | T * C * T * G * T * A * G * G * C * A | | |
| WV- | UCCUUGGCGGTCTTGGUGGC | mU * mCmCmUmU * G * G * C * G * G * T * C * | XOOOXXXXXXXXXXXOOOX | 1109 |
| 1850 | | T * T * G * mGmUmGmG * mC | | |
| WV- | AUCCUTGGCGGTCTTGGUGG | mA * mUmCmCmU * T * G * G * C * G * G * T * | XOOOXXXXXXXXXXXOOOX | 1110 |
| 1851 | | C * T * T * mGmGmUmG * mG | | |
| WV- | GCAUCCTTGGCGGTCUUGGU | mG * mCmAmUmC * C * T * T * G * G * C * G * | XOOOXXXXXXXXXXXOOOX | 1111 |
| 1852 | | G * T * C * mUmUmGmG * mU | | |
| WV- | CUGGCCTGCTGGGCCACCUG | mC * mUmGmGmC * C * T * G * C * T * G * G * | XOOOXXXXXXXXXXXOOOX | 1112 |
| 1853 | | G * C * C * mAmCmCmU * mG | | |
| WV- | GGCGGTCTTGGTGGCGUGCU | mG * mGmCmGmG * T * C * T * T * G * G * T * | XOOOXXXXXXXXXXXOOOX | 1113 |
| 1854 | | G * G * C * mGmUmGmC * mU | | |
| WV- | UGGCGGTCTTGGTGGCGUGC | mU * mGmGmCmG * G * T * C * T * T * G * G * | XOOOXXXXXXXXXXXOOOX | 1114 |
| 1855 | | T * G * G * mCmGmUmG * mC | | |
| WV- | CUUGGCGGTCTTGGTGGCGU | mC * mUmUmGmG * C * G * G * T * C * T * T * | XOOOXXXXXXXXXXXOOOX | 1115 |
| 1856 | | G * G * T * mGmGmCmG * mU | | |
| WV- | CCUUGGCGGTCTTGGUGGCG | mC * mCmUmUmG * G * C * G * G * T * C * T * | XOOOXXXXXXXXXXXOOOX | 1116 |
| 1857 | | T * G * G * mUmGmGmC * mG | | |
| WV- | GGCAGAGGCCAGGAGCGCCA | mG * mGmCmAmG * A * G * G * C * C * A * G * | XOOOXXXXXXXXXXXOOOX | 1117 |
| 1858 | | G * A * G * mCmGmCmC * mA | | |
| WV- | GGGAGGCATCCTCGGCCUCU | mG * mGmGmAmG * G * C * A * T * C * C * T * | XOOOXXXXXXXXXXXOOOX | 1118 |
| 1859 | | C * G * G * mCmCmUmC * mU | | |
| WV- | AAGGGAGGCATCCTCGGCCU | mA * mAmGmGmG * A * G * G * C * A * T * C * | XOOOXXXXXXXXXXXOOOX | 1119 |
| 1860 | | C * T * C * mGmGmCmC * mU | | |
| WV- | GAAGGGAGGCATCCTCGGCC | mG * mAmAmGmG * G * A * G * G * C * A * T * | XOOOXXXXXXXXXXXOOOX | 1120 |
| 1861 | | C * C * T * mCmGmGmC * mC | | |
| WV- | GCGGUCTTGGTGGCGUGCUU | mG * mCmGmGmU * C * T * T * G * G * T * G * | XOOOXXXXXXXXXXXOOOX | 1121 |
| 1862 | | G * C * G * mUmGmCmU * mU | | |
| WV- | GUCUCAGGCAGCCACGGCUG | mG * mUmCmUmC * A * G * G * C * A * G * C * | XOOOXXXXXXXXXXXOOOX | 1122 |
| 1863 | | C * A * C * mGmGmCmU * mG | | |
| WV- | UGCAUCCTTGGCGGTCUUGG | mU * mGmCmAmU * C * C * T * T * G * G * C * | XOOOXXXXXXXXXXXOOOX | 1123 |
| 1864 | | G * G * T * mCmUmUmG * mG | | |
| WV- | CUGCUGGGCCACCTGGGACU | mC * mUmGmCmU * G * G * G * C * C * A * C * | XOOOXXXXXXXXXXXOOOX | 1124 |
| 1865 | | C * T * G * mGmGmAmC * mU | | |
| WV- | UGAAGCCATCGGTCACCCAG | mU * mGmAmAmG * C * C * A * T * C * G * G * | XOOOXXXXXXXXXXXOOOX | 1125 |
| 1866 | | T * C * A * mCmCmCmA * mG | | |
| WV- | CUUGUCCTTAACGGTGCUCC | mC * mUmUmGmU * C * C * T * T * A * A * C * | XOOOXXXXXXXXXXXOOOX | 1126 |
| 1867 | | G * G * T * mGmCmUmC * mC | | |
| WV- | UGUCCAGCTTTATTGGGAGG | mU * mGmUmCmC * A * G * C * T * T * T * A * | XOOOXXXXXXXXXXXOOOX | 1127 |
| 1868 | | T * T * G * mGmGmAmG * mG | | |
| WV- | CUGCATGGCACCTCTGUUCC | mC * mUmGmCmA * T * G * G * C * A * C * C * | XOOOXXXXXXXXXXXOOOX | 1128 |
| 1869 | | T * C * T * mGmUmUmC * mC | | |
| WV- | UGCUCAGTGCATCCTUGGCG | mU * mGmCm UmC * A * G * T * G * C * A * T * | XOOOXXXXXXXXXXXOOOX | 1129 |
| 1870 | | C * C * T * mUmGmGmC * mG | | |
| WV- | CCUGGGACTCCTGCACGCUG | mC * mCmUmGmG * G * A * C * T * C * C * T * | XOOOXXXXXXXXXXXOOOX | 1130 |
| 1871 | | G * C * A * mCmGmCmU * mG | | |
| WV- | UCGGUCACCCAGCCCCUGGC | mU * mCmGmGmU * C * A * C * C * C * A * G * | XOOOXXXXXXXXXXXOOOX | 1131 |
| 1872 | | C * C * C * mCmUmGmG * mC | | |
| WV- | AUCGGTCACCCAGCCCCUGG | mA * mUmCmGmG * T * C * A * C * C * C * A * | XOOOXXXXXXXXXXXOOOX | 1132 |
| 1873 | | G * C * C * mCmCmUmG * mG | | |
| WV- | CAUCGGTCACCCAGCCCCUG | mC * mAmUmCmG * G * T * C * A * C * C * C * | XOOOXXXXXXXXXXXOOOX | 1133 |
| 1874 | | A * G * C * mCmCmCmU * mG | | |
| WV- | CCAUCGGTCACCCAGCCCCU | mC * mCmAmUmC * G * G * T * C * A * C * C * | XOOOXXXXXXXXXXXOOOX | 1134 |
| 1875 | | C * A * G * mCmCmCmC * mU | | |
| WV- | GCCAUCGGTCACCCAGCCCC | mG * mCmCmAmU * C * G * G * T * C * A * C * | XOOOXXXXXXXXXXXOOOX | 1135 |
| 1876 | | C * C * A * mGmCmCmC * mC | | |
| WV- | AGCCATCGGTCACCCAGCCC | mA * mGmCmCmA * T * C * G * G * T * C * A * | XOOOXXXXXXXXXXXOOOX | 1136 |
| 1877 | | C * C * C * mAmGmCmC * mC | | |
| WV- | UCCAGCTTTATTGGGAGGCC | mU * mCmCmAmG * C * T * T * T * A * T * T * | XOOOXXXXXXXXXXXOOOX | 1137 |
| 1878 | | G * G * G * mAmGmGmC * mC | | |
| WV- | CACGCTGCTCAGTGCAUCCU | mC * mAmCmGmC * T * G * C * T * C * A * G * | XOOOXXXXXXXXXXXOOOX | 1138 |
| 1879 | | T * G * C * mAmUmCmC * mU | | |
| WV- | CUCCUGCACGCTGCTCAGUG | mC * mUmCmCmU * G * C * A * C * G * C * T * | XOOOXXXXXXXXXXXOOOX | 1139 |
| 1880 | | G * C * T * mCmAmGmU * mG | | |
| WV- | GGGACTCCTGCACGCUGCUC | mG * mGmGmAmC * T * C * C * T * G * C * A * | XOOOXXXXXXXXXXXOOOX | 1140 |
| 1881 | | C * G * C * mUmGmCmU * mC | | |
| WV- | UGGGACTCCTGCACGCUGCU | mU * mGmGmGmA * C * T * C * C * T * G * C * | XOOOXXXXXXXXXXXOOOX | 1141 |
| 1882 | | A * C * G * mCmUmGmC * mU | | |
| WV- | AGGUCTCAGGCAGCCACGGC | mA * mGmGmUmC * T * C * A * G * G * C * A * | XOOOXXXXXXXXXXXOOOX | 1142 |
| 1883 | | G * C * C * mAmCmGmG * mC | | |
| WV- | GAGGUCTCAGGCAGCCACGG | mG * mAmGmGmU * C * T * C * A * G * G * C * | XOOOXXXXXXXXXXXOOOX | 1143 |
| 1884 | | A * G * C * mCmAmCmG * mG | | |
| WV- | UGAGGTCTCAGGCAGCCACG | mU * mGmAmGmG * T * C * T * C * A * G * G * | XOOOXXXXXXXXXXXOOOX | 1144 |
| 1885 | | C * A * G * mCmCmAmC * mG | | |
| WV- | CCUGGAGATTGCAGGACCCA | mC * mCmUmGmG * A * G * A * T * T * G * C * | XOOOXXXXXXXXXXXOOOX | 1145 |
| 1886 | | A * G * G * mAmCmCmC * mA | | |
| WV- | GCCCUGGAGATTGCAGGACC | mG * mCmCmCmU * G * G * A * G * A * T * T * | XOOOXXXXXXXXXXXOOOX | 1146 |
| 1887 | | G * C * A * mGmGmAmC * mC | | |
| WV- | CGUGCTTCATGTAACCCUGC | mC * mGmUmGmC * T * T * C * A * T * G * T * | XOOOXXXXXXXXXXXOOOX | 1147 |
| 1888 | | A * A * C * mCmCmUmG * mC | | |
| WV- | UGGUCTGACCTCAGGGUCCA | mU * mGmGmUmC * T * G * A * C * C * T * C * | XOOOXXXXXXXXXXXOOOX | 1148 |
| 1889 | | A * G * G * mGmUmCmC * mA | | |
| WV- | AAGUUGGTCTGACCTCAGGG | mA * mAmGmUmU * G * G * T * C * T * G * A * | XOOOXXXXXXXXXXXOOOX | 1149 |
| 1890 | | C * C * T * mCmAmGmG * mG | | |
| WV- | CCACGGCTGAAGTTGGUCUG | mC * mCmAmCmG * G * C * T * G * A * A * G * | XOOOXXXXXXXXXXXOOOX | 1150 |
| 1891 | | T * T * G * mGmUmCmU * mG | | |
| WV- | AGCCACGGCTGAAGTUGGUC | mA * mGmCmCmA * C * G * G * C * T * G * A * | XOOOXXXXXXXXXXXOOOX | 1151 |
| 1892 | | A * G * T * mUmGmGmU * mC | | |
| WV- | GUCUUGGTGGCGTGCUUCAU | mG * mUmCmUmU * G * G * T * G * G * C * G * | XOOOXXXXXXXXXXXOOOX | 1152 |
| 1893 | | T * G * C * mUmUmCmA * mU | | |
| WV- | GCGUGCTTCATGTAACCCUG | mG * mCmGmUmG * C * T * T * C * A * T * G * | XOOOXXXXXXXXXXXOOOX | 1153 |
| 1894 | | T * A * A * mCmCmCmU * mG | | |
| WV- | GCUGAAGTTGGTCTGACCUC | mG * mCmUmGmA * A * G * T * T * G * G * T * | XOOOXXXXXXXXXXXOOOX | 1154 |
| 1895 | | C * T * G * mAmCmCmU * mC | | |
| WV- | GGGCCTCCCAAGGCAAACCC | mG * mGmGmCmC * T * C * C * C * A * A * G * | XOOOXXXXXXXXXXXOOOX | 1155 |
| 1896 | | G * C * A * mAmAmCmC * mC | | |
| WV- | AACCUTAGCTGGGTCUGCCA | mA * mAmCmCmU * T * A * G * C * T * G * G * | XOOOXXXXXXXXXXXOOOX | 1156 |
| 1897 | | G * T * C * mUmGmCmC * mA | | |
| WV- | UUGUCCAGCTTTATTGGGAG | mU * mU * mG * mU * mC * C * A * G * C * T * | XXXXXXXXXXXXXXXXXXX | 1157 |
| 2115 | | T * T * A * T * T * mG * mG * mG * mA * mG | | |
| WV- | CUUGUCCAGCTTTATUGGGA | mC * mU * mU * mG * mU * C * C * A * G * C * | XXXXXXXXXXXXXXXXXXX | 1158 |
| 2116 | | T * T * T * A * T * mU * mG * mG * mG * mA | | |
| WV- | UCUUGTCCAGCTTTAUUGGG | mU * mC * mU * mU * mG * T * C * C * A * G * | XXXXXXXXXXXXXXXXXXX | 1159 |
| 2117 | | C * T * T * T * A * mU * mU * mG * mG * mG | | |
| WV- | UUCUUGTCCAGCTTTAUUGG | mU * mU * mC * mU * mU * G * T * C * C * A * | XXXXXXXXXXXXXXXXXXX | 1160 |
| 2118 | | G * C * T * T * T * mA * mU * mU * mG * mG | | |
| WV- | CUUCUTGTCCAGCTTUAUUG | mC * mU * mU * mC * mU * T * G * T * C * C * | XXXXXXXXXXXXXXXXXXX | 1161 |
| 2119 | | A * G * C * T * T * mU * mA * mU * mU * mG | | |
| WV- | GCUUCTTGTCCAGCTUUAUU | mG * mC * mU * mU * mC * T * T * G * T * C * C | XXXXXXXXXXXXXXXXXXX | 1162 |
| 2120 | | * A * G * C * T * mU * mU * mA * mU * mU | | |
| WV- | AGCUUCTTGTCCAGCUUUAU | mA * mG * mC * mU * mU * C * T * T * G * T * | XXXXXXXXXXXXXXXXXXX | 1163 |
| 2121 | | C * C * A * G * C * mU * mU * mU * mA * mU | | |
| WV- | CAGCUTCTTGTCCAGCUUUA | mC * mA * mG * mC * mU * T * C * T * T * G * T | XXXXXXXXXXXXXXXXXXX | 1164 |
| 2122 | | * C * C * A * G * mC * mU * mU * mU * mA | | |
| WV- | GCAGCTTCTTGTCCAGCUUU | mG * mC * mA * mG * mC * T * T * C * T * T * G | XXXXXXXXXXXXXXXXXXX | 1165 |
| 2123 | | * T * C * C * A * mG * mC * mU * mU * mU | | |
| WV- | AGCAGCTTCTTGTCCAGCUU | mA * mG * mC * mA * mG * C * T * T * C * T * T | XXXXXXXXXXXXXXXXXXX | 1166 |
| 2124 | | * G * T * C * C * mA * mG * mC * mU * mU | | |
| WV- | UAGCAGCTTCTTGTCCAGCU | mU * mA * mG * mC * mA * G * C * T * T * C * T | XXXXXXXXXXXXXXXXXXX | 1167 |
| 2125 | | * T * G * T * C * mC * mA * mG * mC * mU | | |
| WV- | AUAGCAGCTTCTTGTCCAGC | mA * mU * mA * mG * mC * A * G * C * T * T * | XXXXXXXXXXXXXXXXXXX | 1168 |
| 2126 | | C * T * T * G * T * mC * mC * mA * mG * mC | | |
| WV- | CAUAGCAGCTTCTTGUCCAG | mC * mA * mU * mA * mG * C * A * G * C * T * | XXXXXXXXXXXXXXXXXXX | 1169 |
| 2127 | | T * C * T * T * G * mU * mC * mC * mA * mG | | |
| WV- | UUGUCCAGCTTTATTGGGAG | mU * mUmGmUmC * C * A * G * C * T * T * T * | XOOOXXXXXXXXXXXOOOX | 1170 |
| 2128 | | A * T * T * mGmGmGmA * mG | | |
| WV- | CUUGUCCAGCTTTATUGGGA | mC * mUmUmGmU * C * C * A * G * C * T * T * | XOOOXXXXXXXXXXXOOOX | 1171 |
| 2129 | | T * A * T * mUmGmGmG * mA | | |
| WV- | UCUUGTCCAGCTTTAUUGGG | mU * mCmUmUmG * T * C * C * A * G * C * T * | XOOOXXXXXXXXXXXOOOX | 1172 |
| 2130 | | T * T * A * mUmUmGmG * mG | | |
| WV- | UUCUUGTCCAGCTTTAUUGG | mU * mUmCmUmU * G * T * C * C * A * G * C * | XOOOXXXXXXXXXXXOOOX | 1173 |
| 2131 | | T * T * T * mAmUmUmG * mG | | |
| WV- | CUUCUTGTCCAGCTTUAUUG | mC * mUmUmCmU * T * G * T * C * C * A * G * | XOOOXXXXXXXXXXXOOOX | 1174 |
| 2132 | | C * T * T * mUmAmUmU * mG | | |
| WV- | GCUUCTTGTCCAGCTUUAUU | mG * mCmUmUmC * T * T * G * T * C * C * A * | XOOOXXXXXXXXXXXOOOX | 1175 |
| 2133 | | G * C * T * mUmUmAmU * mU | | |
| WV- | AGCUUCTTGTCCAGCUUUAU | mA * mGmCmUmU * C * T * T * G * T * C * C * | XOOOXXXXXXXXXXXOOOX | 1176 |
| 2134 | | A * G * C * mUmUmUmA * mU | | |
| WV- | CAGCUTCTTGTCCAGCUUUA | mC * mAmGmCmU * T * C * T * T * G * T * C * | XOOOXXXXXXXXXXXOOOX | 1177 |
| 2135 | | C * A * G * mCmUmUmU * mA | | |
| WV- | GCAGCTTCTTGTCCAGCUUU | mG * mCmAmGmC * T * T * C * T * T * G * T * C | XOOOXXXXXXXXXXXOOOX | 1178 |
| 2136 | | * C * A * mGmCmUmU * mU | | |
| WV- | AGCAGCTTCTTGTCCAGCUU | mA * mGmCmAmG * C * T * T * C * T * T * G * T | XOOOXXXXXXXXXXXOOOX | 1179 |
| 2137 | | * C * C * mAmGmCmU * mU | | |
| WV- | UAGCAGCTTCTTGTCCAGCU | mU * mAmGmCmA * G * C * T * T * C * T * T * | XOOOXXXXXXXXXXXOOOX | 1180 |
| 2138 | | G * T * C * mCmAmGmC * mU | | |
| WV- | AUAGCAGCTTCTTGTCCAGC | mA * mUmAmGmC * A * G * C * T * T * C * T * | XOOOXXXXXXXXXXXOOOX | 1181 |
| 2139 | | T * G * T * mCmCmAmG * mC | | |
| WV- | CAUAGCAGCTTCTTGUCCAG | mC * mAmUmAmG * C * A * G * C * T * T * C * | XOOOXXXXXXXXXXXOOOX | 1182 |
| 2140 | | T * T * G * mUmCmCmA * mG | | |
| WV- | AGCTTCTTGTCCAGCTTTAT | Aeo * Geo * m5Ceo * Teo * Teo * C * T * T * G * | XXXXXXXXXXXXXXXXXXX | 1183 |
| 2141 | | T * C * C * A * G * C * Teo * Teo * Teo * Aeo * | | |
| | | Teo | | |
| WV- | UGUCCAGCTTTATTGGGAGG | mU * SmGmUmCmC * SA * SG * SC * ST * ST * | SOOOSSSSSSSSRSSOOOS | 1184 |
| 2549 | | ST * SA * ST * RT * SG * SmGmGmAmG * SmG | | |
| WV- | UGUCCAGCTTTATTGGGAGG | mU * SmGmUmCmC * SA * SG * SC * ST * ST * | SOOOSSSSSSSRSSSOOOS | 1185 |
| 2550 | | ST * SA * RT * ST * SG * SmGmGmAmG * SmG | | |
| WV- | UGUCCAGCTTTATTGGGAGG | mU * SmGmUmCmC * SA * SG * SC * ST * ST * | SOOOSSSSSSRSSSSOOOS | 1186 |
| 2551 | | ST * RA * ST * ST * SG * SmGmGmAmG * SmG | | |
| WV- | UGUCCAGCTTTATTGGGAGG | mU * SmGmUmCmCmA * SG * SC * ST * ST * ST | SOOOOSSSSSSSRSSSOOS | 1187 |
| 2552 | | * SA * ST * RT * SG * SG * SmGmAmG * SmG | | |
| WV- | UGUCCAGCTTTATTGGGAGG | mU * SmGmUmCmC * SA * SG * SC * ST * ST * | SOOOSSSSSSSSSSRSSOS | 1188 |
| 2553 | | ST * SA * ST * ST * SG * RG * SG * SmAmG * | | |
| | | SmG | | |
| WV- | UGUCCAGCTTTATTGGGAGG | mU * SmGmUmCmCmA * SG * SC * ST * ST * ST | SOOOOSSSSSSSSSRSSSS | 1189 |
| 2554 | | * SA * ST * ST * SG * RG * SG * SA * SmG * SmG | | |
| WV- | UGUCCAGCTTTATTGGGAGG | mU * mGmUmCmC * A * G * C * T * T * T * A * | XOOOXXXXXXXXXXXXXOX | 1190 |
| 2677 | | T * T * G * G * G * mAmG * mG | | |
| WV- | UGUCCAGCTTTATTGGGAGG | mU * mGmUmCmCmA * G * C * T * T * T * A * | XOOOXXXXXXXXXXXXXX | 1191 |
| 2678 | | T * T * G * G * G * A * mG * mG | | |
| WV- | GGAGCAGCTGCCTCTAGGGA | mG * mG * mA * mG * mc * A * G * C * T * G * | XXXXXXXXXXXXXXXXXXX | 1192 |
| 1391 | | C * C * T * C * T * mA * mG * mG * mG * mA | | |
| WV- | UGGAGCAGCTGCCTCUAGGG | mU * mG * mG * mA * mG * C * A * G * C * T * | XXXXXXXXXXXXXXXXXXX | 1193 |
| 1392 | | G * C * C * T * C * mU * mA * mG * mG * mG | | |
| WV- | UGUUCCTGGAGCAGCUGCCU | mU * mG * mU * mU * mC * C * T * G * G * A * | XXXXXXXXXXXXXXXXXXX | 1194 |
| 1393 | | G * C * A * G * C * mU * mG * mC * mC * mU | | |
| WV- | UCCUUGGCGGTCTTGGUGGC | mU * mC * mC * mU * mU * G * G * C * G * G | XXXXXXXXXXXXXXXXXXX | 1195 |
| 1394 | | * T * C * T * T * G * mG * mU * mG * mG * mC | | |
| WV- | AUCCUTGGCGGTCTTGGUGG | mA * mU * mC * mC * mU * T * G * G * C * G * | XXXXXXXXXXXXXXXXXXX | 1196 |
| 1395 | | G * T * C * T * T * mG * mG * mU * mG * mG | | |
| WV- | CAUCCTTGGCGGTCTUGGUG | mC * mA * mU * mC * mC * T * T * G * G * C * | XXXXXXXXXXXXXXXXXXX | 1197 |
| 1396 | | G * G * T * C * T * mU * mG * mG * mU * mG | | |
| WV- | GCAUCCTTGGCGGTCUUGGU | mG * mC * mA * mU * mC * C * T * T * G * G * | XXXXXXXXXXXXXXXXXXX | 1198 |
| 1397 | | C * G * G * T * C * mU * mU * mG * mG * mU | | |
| WV- | CUGGCCTGCTGGGCCACCUG | mC * mU * mG * mG * mC * C * T * G * C * T * | XXXXXXXXXXXXXXXXXXX | 1199 |
| 1398 | | G * G * G * C * C * mA * mC * mC * mU * mG | | |
| WV- | GGCGGTCTTGGTGGCGUGCU | mG * mG * mC * mG * mG * T * C * T * T * G * | XXXXXXXXXXXXXXXXXXX | 1200 |
| 1399 | | G * T * G * G * C * mG * mU * mG * mC * mU | | |
| WV- | UGGCGGTCTTGGTGGCGUGC | mU * mG * mG * mC * mG * G * T * C * T * T * | XXXXXXXXXXXXXXXXXXX | 1201 |
| 1400 | | G * G * T * G * G * mC * mG * mU * mG * mC | | |
| WV- | UUGGCGGTCTTGGTGGCGUG | mU * mU * mG * mG * mC * G * G * T * C * T * | XXXXXXXXXXXXXXXXXXX | 1202 |
| 1401 | | T * G * G * T * G * mG * mC * mG * mU * mG | | |
| WV- | CUUGGCGGTCTTGGTGGCGU | mC * mU * mU * mG * mG * C * G * G * T * C * | XXXXXXXXXXXXXXXXXXX | 1203 |
| 1402 | | T * T * G * G * T * mG * mG * mC * mG * mU | | |
| WV- | CCUUGGCGGTCTTGGUGGCG | mC * mC * mU * mU * mG * G * C * G * G * T * | XXXXXXXXXXXXXXXXXXX | 1204 |
| 1403 | | C * T * T * G * G * mU * mG * mG * mC * mG | | |
| WV- | GCCCCTGGCCTGCTGGGCCA | mG * mC * mC * mC * mC * T * G * G * C * C * | XXXXXXXXXXXXXXXXXXX | 1205 |
| 1404 | | T * G * C * T * G * mG * mG * mC * mC * mA | | |
| WV- | GGCAGAGGCCAGGAGCGCCA | mG * mG * mC * mA * mG * A * G * G * C * C * | XXXXXXXXXXXXXXXXXXX | 1206 |
| 1405 | | A * G * G * A * G * mC * mG * mC * mC * mA | | |
| WV- | GAGGCATCCTCGGCCUCUGA | mG * mA * mG * mG * mC * A * T * C * C * T * | XXXXXXXXXXXXXXXXXXX | 1207 |
| 1406 | | C * G * G * C * C * mU * mC * mU * mG * mA | | |
| WV- | GGAGGCATCCTCGGCCUCUG | mG * mG * mA * mG * mG * C * A * T * C * C * | XXXXXXXXXXXXXXXXXXX | 1208 |
| 1407 | | T * C * G * G * C * mC * mU * mC * mU * mG | | |
| WV- | GGGAGGCATCCTCGGCCUCU | mG * mG * mG * mA * mG * G * C * A * T * C * | XXXXXXXXXXXXXXXXXXX | 1209 |
| 1408 | | C * T * C * G * G * mC * mC * mU * mC * mU | | |
| WV- | AGGGAGGCATCCTCGGCCUC | mA * mG * mG * mG * mA * G * G * C * A * T * | XXXXXXXXXXXXXXXXXXX | 1210 |
| 1409 | | C * C * T * C * G * mG * mC * mC * mU * mC | | |
| WV- | AAGGGAGGCATCCTCGGCCU | mA * mA * mG * mG * mG * A * G * G * C * A | XXXXXXXXXXXXXXXXXXX | 1211 |
| 1410 | | * T * C * C * T * C * mG * mG * mC * mC * mU | | |
| WV- | GAAGGGAGGCATCCTCGGCC | mG * mA * mA * mG * mG * G * A * G * G * C | XXXXXXXXXXXXXXXXXXX | 1212 |
| 1411 | | * A * T * C * C * T * mC * mG * mG * mC * mC | | |
| WV- | GGUCUTGGTGGCGTGCUUCA | mG * mG * mU * mC * mU * T * G * G * T * G * | XXXXXXXXXXXXXXXXXXX | 1213 |
| 1412 | | G * C * G * T * G * mC * mU * mU * mC * mA | | |
| WV- | GCGGUCTTGGTGGCGUGCUU | mG * mC * mG * mG * mU * C * T * T * G * G * | XXXXXXXXXXXXXXXXXXX | 1214 |
| 1413 | | T * G * G * C * G * mU * mG * mC * mU * mU | | |
| WV- | GUCUCAGGCAGCCACGGCUG | mG * mU * mC * mU * mC * A * G * G * C * A * | XXXXXXXXXXXXXXXXXXX | 1215 |
| 1414 | | G * C * C * A * C * mG * mG * mC * mU * mG | | |
| WV- | AGGCCAGCATGCCTGGAGGG | mA * mG * mG * mC * mC * A * G * C * A * T * | XXXXXXXXXXXXXXXXXXX | 1216 |
| 1415 | | G * C * C * T * G * mG * mA * mG * mG * mG | | |
| WV- | UGCAUCCTTGGCGGTCUUGG | mU * mG * mC * mA * mU * C * C * T * T * G * | XXXXXXXXXXXXXXXXXXX | 1217 |
| 1416 | | G * C * G * G * T * mC * mU * mU * mG * mG | | |
| WV- | GUGCATCCTTGGCGGUCUUG | mG * mU * mG * mC * mA * T * C * C * T * T * | XXXXXXXXXXXXXXXXXXX | 1218 |
| 1417 | | G * G * C * G * G * mU * mC * mU * mU * mG | | |
| WV- | CUGCUGGGCCACCTGGGACU | mC * mU * mG * mC * mU * G * G * G * C * C * | XXXXXXXXXXXXXXXXXXX | 1219 |
| 1418 | | A * C * C * T * G * mG * mG * mA * mC * mU | | |
| WV- | UGAAGCCATCGGTCACCCAG | mU * mG * mA * mA * mG * C * C * A * T * C * | XXXXXXXXXXXXXXXXXXX | 1220 |
| 1419 | | G * G * T * C * A * mC * mC * mC * mA * mG | | |
| WV- | CUGAAGCCATCGGTCACCCA | mC * mU * mG * mA * mA * G * C * C * A * T * | XXXXXXXXXXXXXXXXXXX | 1221 |
| 1420 | | C * G * G * T * C * mA * mC * mC * mC * mA | | |
| WV- | CUUGUCCTTAACGGTGCUCC | mC * mU * mU * mG * mU * C * C * T * T * A * | XXXXXXXXXXXXXXXXXXX | 1222 |
| 1421 | | A * C * G * G * T * mG * mC * mU * mC * mC | | |
| WV- | UGUCCAGCTTTATTGGGAGG | mU * mG * mU * mC * mC * A * G * C * T * T * | XXXXXXXXXXXXXXXXXXX | 1223 |
| 1422 | | T * A * T * T * G * mG * mG * mA * mG * mG | | |
| WV- | UGCCUCTAGGGATGAACUGA | mU * mG * mC * mC * mU * C * T * A * G * G * | XXXXXXXXXXXXXXXXXXX | 1224 |
| 1423 | | G * A * T * G * A * mA * mC * mU * mG * mA | | |
| WV- | CUGCATGGCACCTCTGUUCC | mC * mU * mG * mC * mA * T * G * G * C * A * | XXXXXXXXXXXXXXXXXXX | 1225 |
| 1424 | | C * C * T * C * T * mG * mU * mU * mC * mC | | |
| WV- | GGGCUGCATGGCACCUCUGU | mG * mG * mG * mC * mU * G * C * A * T * G * | XXXXXXXXXXXXXXXXXXX | 1226 |
| 1425 | | G * C * A * C * C * mU * mC * mU * mG * mU | | |
| WV- | CUCUGAAGCTCGGGCAGAGG | mC * mU * mC * mU * mG * A * A * G * C * T * | XXXXXXXXXXXXXXXXXXX | 1227 |
| 1426 | | C * G * G * G * C * mA * mG * mA * mG * mG | | |
| WV- | CCUCUGAAGCTCGGGCAGAG | mC * mC * mU * mC * mU * G * A * A * G * C * | XXXXXXXXXXXXXXXXXXX | 1228 |
| 1427 | | T * C * G * G * G * mC * mA * mG * mA * mG | | |
| WV- | GCCUCTGAAGCTCGGGCAGA | mG * mC * mC * mU * mC * T * G * A * A * G * | XXXXXXXXXXXXXXXXXXX | 1229 |
| 1428 | | C * T * C * G * G * mG * mC * mA * mG * mA | | |
| WV- | CGGCCTCTGAAGCTCGGGCA | mC * mG * mG * mC * mC * T * C * T * G * A * | XXXXXXXXXXXXXXXXXXX | 1230 |
| 1429 | | A * G * C * T * C * mG * mG * mG * mC * mA | | |
| WV- | UCGGCCTCTGAAGCTCGGGC | mU * mC * mG * mG * mC * C * T * C * T * G * | XXXXXXXXXXXXXXXXXXX | 1231 |
| 1430 | | A * A * G * C * T * mC * mG * mG * mG * mC | | |
| WV- | CUCGGCCTCTGAAGCUCGGG | mC * mU * mC * mG * mG * C * C * T * C * T * | XXXXXXXXXXXXXXXXXXX | 1232 |
| 1431 | | G * A * A * G * C * mU * mC * mG * mG * mG | | |
| WV- | CCUCGGCCTCTGAAGCUCGG | mC * mC * mU * mC * mG * G * C * C * T * C * | XXXXXXXXXXXXXXXXXXX | 1233 |
| 1432 | | T * G * A * A * G * mC * mU * mC * mG * mG | | |
| WV- | UCCUCGGCCTCTGAAGCUCG | mU * mC * mC * mU * mC * G * G * C * C * T * | XXXXXXXXXXXXXXXXXXX | 1234 |
| 1433 | | C * T * G * A * A * mG * mC * mU * mC * mG | | |
| WV- | UGCUCAGTGCATCCTUGGCG | mU * mG * mC * mU * mC * A * G * T * G * C * | XXXXXXXXXXXXXXXXXXX | 1235 |
| 1434 | | A * T * C * C * T * mU * mG * mG * mC * mG | | |
| WV- | CCUGGGACTCCTGCACGCUG | mC * mC * mU * mG * mG * G * A * C * T * C * | XXXXXXXXXXXXXXXXXXX | 1236 |
| 1435 | | C * T * G * C * A * mC * mG * mC * mU * mG | | |
| WV- | CCACCTGGGACTCCTGCACG | mC * mC * mA * mC * mC * T * G * G * G * A * | XXXXXXXXXXXXXXXXXXX | 1237 |
| 1436 | | C * T * C * C * T * mG * mC * mA * mC * mG | | |
| WV- | UCGGUCACCCAGCCCCUGGC | mU * mC * mG * mG * mU * C * A * C * C * C * | XXXXXXXXXXXXXXXXXXX | 1238 |
| 1437 | | A * G * C * C * C * mC * mU * mG * mG * mC | | |
| WV- | AUCGGTCACCCAGCCCCUGG | mA * mU * mC * mG * mG * T * C * A * C * C * | XXXXXXXXXXXXXXXXXXX | 1239 |
| 1438 | | C * A * G * C * C * mC * mC * mU * mG * mG | | |
| WV- | CAUCGGTCACCCAGCCCCUG | mC * mA * mU * mC * mG * G * T * C * A * C * | XXXXXXXXXXXXXXXXXXX | 1240 |
| 1439 | | C * C * A * G * C * mC * mC * mC * mU * mG | | |
| WV- | CCAUCGGTCACCCAGCCCCU | mC * mC * mA * mU * mC * G * G * T * C * A * | XXXXXXXXXXXXXXXXXXX | 1241 |
| 1440 | | C * C * C * A * G * mC * mC * mC * mC * mU | | |
| WV- | GCCAUCGGTCACCCAGCCCC | mG * mC * mC * mA * mU * C * G * G * T * C * | XXXXXXXXXXXXXXXXXXX | 1242 |
| 1441 | | A * C * C * C * A * mG * mC * mC * mC * mC | | |
| WV- | AGCCATCGGTCACCCAGCCC | mA * mG * mC * mC * mA * T * C * G * G * T * | XXXXXXXXXXXXXXXXXXX | 1243 |
| 1442 | | C * A * C * C * C * mA * mG * mC * mC * mC | | |
| WV- | UCCAGCTTTATTGGGAGGCC | mU * mC * mC * mA * mG * C * T * T * T * A * | XXXXXXXXXXXXXXXXXXX | 1244 |
| 1443 | | T * T * G * G * G * mA * mG * mG * mC * mC | | |
| WV- | CAUCCTCGGCCTCTGAAGCU | mC * mA * mU * mC * mC * T * C * G * G * C * | XXXXXXXXXXXXXXXXXXX | 1245 |
| 1444 | | C * T * C * T * G * mA * mA * mG * mC * mU | | |
| WV- | AGGCATCCTCGGCCTCUGAA | mA * mG * mG * mC * mA * T * C * C * T * C * | XXXXXXXXXXXXXXXXXXX | 1246 |
| 1445 | | G * G * C * C * T * mC * mU * mG * mA * mA | | |
| WV- | UCUUGGTGGCGTGCTUCAUG | mU * mC * mU * mU * mG * G * T * G * G * C | XXXXXXXXXXXXXXXXXXX | 1247 |
| 1446 | | * G * T * G * C * T * mU * mC * mA * mU * mG | | |
| WV- | CACGCTGCTCAGTGCAUCCU | mC * mA * mC * mG * mC * T * G * C * T * C * | XXXXXXXXXXXXXXXXXXX | 1248 |
| 1447 | | A * G * T * G * C * mA * mU * mC * mC * mU | | |
| WV- | CUCCUGCACGCTGCTCAGUG | mC * mU * mC * mC * mU * G * C * A * C * G * | XXXXXXXXXXXXXXXXXXX | 1249 |
| 1448 | | C * T * G * C * T * mC * mA * mG * mU * mG | | |
| WV- | GGACUCCTGCACGCTGCUCA | mG * mG * mA * mC * mU * C * C * T * G * C * | XXXXXXXXXXXXXXXXXXX | 1250 |
| 1449 | | A * C * G * C * T * mG * mC * mU * mC * mA | | |
| WV- | GGGACTCCTGCACGCUGCUC | mG * mG * mG * mA * mC * T * C * C * T * G * | XXXXXXXXXXXXXXXXXXX | 1251 |
| 1450 | | C * A * C * G * C * mU * mG * mC * mU * mC | | |
| WV- | UGGGACTCCTGCACGCUGCU | mU * mG * mG * mG * mA * C * T * C * C * T * | XXXXXXXXXXXXXXXXXXX | 1252 |
| 1451 | | G * C * A * C * G * mC * mU * mG * mC * mU | | |
| WV- | AGGUCTCAGGCAGCCACGGC | mA * mG * mG * mU * mC * T * C * A * G * G * | XXXXXXXXXXXXXXXXXXX | 1253 |
| 1452 | | C * A * G * C * C * mA * mC * mG * mG * mC | | |
| WV- | GAGGUCTCAGGCAGCCACGG | mG * mA * mG * mG * mU * C * T * C * A * G * | XXXXXXXXXXXXXXXXXXX | 1254 |
| 1453 | | G * C * A * G * C * mC * mA * mC * mG * mG | | |
| WV- | UGAGGTCTCAGGCAGCCACG | mU * mG * mA * mG * mG * T * C * T * C * A * | XXXXXXXXXXXXXXXXXXX | 1255 |
| 1454 | | G * G * C * A * G * mC * mC * mA * mC * mG | | |
| WV- | CCUGGAGATTGCAGGACCCA | mC * mC * mU * mG * mG * A * G * A * T * T * | XXXXXXXXXXXXXXXXXXX | 1256 |
| 1455 | | G * C * A * G * G * mA * mC * mC * mC * mA | | |
| WV- | GCCCUGGAGATTGCAGGACC | mG * mC * mC * mC * mU * G * G * A * G * A * | XXXXXXXXXXXXXXXXXXX | 1257 |
| 1456 | | T * T * G * C * A * mG * mG * mA * mC * mC | | |
| WV- | CCAGGAGCGCCAGGAGGGCA | mC * mC * mA * mG * mG * A * G * C * G * C * | XXXXXXXXXXXXXXXXXXX | 1258 |
| 1457 | | C * A * G * G * A * mG * mG * mG * mC * mA | | |
| WV- | CGUGCTTCATGTAACCCUGC | mC * mG * mU * mG * mC * T * T * C * A * T * | XXXXXXXXXXXXXXXXXXX | 1259 |
| 1458 | | G * T * A * A * C * mC * mC * mU * mG * mC | | |
| WV- | UGGUCTGACCTCAGGGUCCA | mU * mG * mG * mU * mC * T * G * A * C * C * | XXXXXXXXXXXXXXXXXXX | 1260 |
| 1459 | | T * C * A * G * G * mG * mU * mC * mC * mA | | |
| WV- | UUGGUCTGACCTCAGGGUCC | mU * mU * mG * mG * mU * C * T * G * A * C * | XXXXXXXXXXXXXXXXXXX | 1261 |
| 1460 | | C * T * C * A * G * mG * mG * mU * mC * mC | | |
| WV- | AAGUUGGTCTGACCTCAGGG | mA * mA * mG * mU * mU * G * G * T * C * T * | XXXXXXXXXXXXXXXXXXX | 1262 |
| 1461 | | G * A * C * C * T * mC * mA * mG * mG * mG | | |
| WV- | UGAAGTTGGTCTGACCUCAG | mU * mG * mA * mA * mG * T * T * G * G * T * | XXXXXXXXXXXXXXXXXXX | 1263 |
| 1462 | | C * T * G * A * C * mC * mU * mC * mA * mG | | |
| WV- | CACGGCTGAAGTTGGUCUGA | mC * mA * mC * mG * mG * C * T * G * A * A * | XXXXXXXXXXXXXXXXXXX | 1264 |
| 1463 | | G * T * T * G * G * mU * mC * mU * mG * mA | | |
| WV- | CCACGGCTGAAGTTGGUCUG | mC * mC * mA * mC * mG * G * C * T * G * A * | XXXXXXXXXXXXXXXXXXX | 1265 |
| 1464 | | A * G * T * T * G * mG * mU * mC * mU * mG | | |
| WV- | GCCACGGCTGAAGTTGGUCU | mG * mC * mC * mA * mC * G * G * C * T * G * | XXXXXXXXXXXXXXXXXXX | 1266 |
| 1465 | | A * A * G * T * T * mG * mG * mU * mC * mU | | |
| WV- | AGCCACGGCTGAAGTUGGUC | mA * mG * mC * mC * mA * C * G * G * C * T * | XXXXXXXXXXXXXXXXXXX | 1267 |
| 1466 | | G * A * A * G * T * mU * mG * mG * mU * mC | | |
| WV- | GUCUUGGTGGCGTGCUUCAU | mG * mU * mC * mU * mU * G * G * T * G * G | XXXXXXXXXXXXXXXXXXX | 1268 |
| 1467 | | * C * G * T * G * C * mU * mU * mC * mA * mU | | |
| WV- | CAGUGCATCCTTGGCGGUCU | mC * mA * mG * mU * mG * C * A * T * C * C * | XXXXXXXXXXXXXXXXXXX | 1269 |
| 1468 | | T * T * G * G * C * mG * mG * mU * mC * mU | | |
| WV- | CUGCCTCTAGGGATGAACUG | mC * mU * mG * mC * mC * T * C * T * A * G * | XXXXXXXXXXXXXXXXXXX | 1270 |
| 1469 | | G * G * A * T * G * mA * mA * mC * mU * mG | | |
| WV- | GGCAUCCTCGGCCTCUGAAG | mG * mG * mC * mA * mU * C * C * T * C * G * | XXXXXXXXXXXXXXXXXXX | 1271 |
| 1470 | | G * C * C * T * C * mU * mG * mA * mA * mG | | |
| WV- | UUGGUGGCGTGCTTCAUGUA | mU * mU * mG * mG * mU * G * G * C * G * T | XXXXXXXXXXXXXXXXXXX | 1272 |
| 1471 | | * G * C * T * T * C * mA * mU * mG * mU * mA | | |
| WV- | GCGUGCTTCATGTAACCCUG | mG * mC * mG * mU * mG * C * T * T * C * A * | XXXXXXXXXXXXXXXXXXX | 1273 |
| 1472 | | T * G * T * A * A * mC * mC * mC * mU * mG | | |
| WV- | UGAGAAGGGAGGCATCCUCG | mU * mG * mA * mG * mA * A * G * G * G * A | XXXXXXXXXXXXXXXXXXX | 1274 |
| 1473 | | * G * G * C * A * T * mC * mC * mU * mC * mG | | |
| WV- | GCUGAAGTTGGTCTGACCUC | mG * mC * mU * mG * mA * A * G * T * T * G * | XXXXXXXXXXXXXXXXXXX | 1275 |
| 1474 | | G * T * C * T * G * mA * mC * mC * mU * mC | | |
| WV- | GGGCCTCCCAAGGCAAACCC | mG * mG * mG * mC * mC * T * C * C * C * A * | XXXXXXXXXXXXXXXXXXX | 1276 |
| 1475 | | A * G * G * C * A * mA * mA * mC * mC * mC | | |
| WV- | GUUUATGCCCCTGGGCCUGA | mG * mU * mU * mU * mA * T * G * C * C * C * | XXXXXXXXXXXXXXXXXXX | 1277 |
| 1476 | | C * T * G * G * G * mC * mC * mU * mG * mA | | |
| WV- | AACCUTAGCTGGGTCUGCCA | mA * mA * mC * mC * mU * T * A * G * C * T * | XXXXXXXXXXXXXXXXXXX | 1278 |
| 1477 | | G * G * G * T * C * mU * mG * mC * mC * mA | | |
| WV- | CACCCATTGGGACTGGGAUC | mC * mA * mC * mC * mC * A * T * T * G * G * | XXXXXXXXXXXXXXXXXXX | 1279 |
| 1478 | | G * A * C * T * G * mG * mG * mA * mU * mC | | |
| WV- | CUCCUGCTTGACCACCCAUU | mC * mU * mC * mC * mU * G * C * T * T * G * | XXXXXXXXXXXXXXXXXXXX | 1280 |
| 1479 | | A * C * C * A * C * mC * mC * mA * mU * mU | | |
| WV- | GCUCCTGCTTGACCACCCAU | mG * mC * mU * mC * mC * T * G * C * T * T * | XXXXXXXXXXXXXXXXXXXX | 1281 |
| 1480 | | G * A * C * C * A * mC * mC * mC * mA * mU | | |
| WV- | UGGGCTCCTGCTTGACCACC | mU * mG * mG * mG * mC * T * C * C * T * G * | XXXXXXXXXXXXXXXXXXXX | 1282 |
| 1481 | | C * T * T * G * A * mC * mC * mA * mC * mC | | |
| WV- | TGUCCAGCUUUAUUGG | T * SfG * SmUfC * SmCfA * SmGfC * SmU * SfU | SSO SO SO SSSO | 1283 |
| 8070 | GAGTUTTTTTGG | * SmUfA * SmU * SfU * SmG * SfG * SmG * SfA | SSSSSSSSSOOOOO | |
| | TAATCCACTTTCAGAGG | * SmG * ST * SmUTTTTTeo * Geo * Geo * Teo | XXXXXXXXXXXXXXXXXXXO | |
| | | * Aeo * A * T * m5C * m5C * A * m5C * T * T * | | |
| | | T * m5C * Aeo * Geo * Aeo * Geo * | | |
| | | GeoL003Mod001 | | |
| WV- | TGUCCAGCUUUAUUGG | T * SfG * SmUfC * SmCfA * SmGfC * SmU * SfU | SSO SO SO SSSO | 1284 |
| 8068 | GAGTUTTTTTGG | * SmUfA * SmU * SfU * SmG * SfG * SmG * SfA | SSSSSSSSSOOOOO | |
| | TAATCCACTTTCAGAGG | * SmG * STGaNC6T * SmUTTTTTeo * Geo * | XXXXXXXXXXXXXXXXXXX | |
| | | Geo * Teo * Aeo * A * T * m5C * m5C * A * | | |
| | | m5C * T * T * T * m5C * Aeo * Geo * Aeo * | | |
| | | Geo * Geo | | |
| WV- | TGUCCAGCUUUAUUGG | VPT * SfG * SmUfC * SmCfA * SmGfC * SmU * | SSO SO SO SSSO | 1285 |
| 8066 | GAGTUTTTTTGG | SfU * SmUfA * SmU * SfU * SmG * SfG * SmG | SSSSSSSSSOOOOO | |
| | TAATCCACTTTCAGAGG | * SfA * SmG * ST * SmUTTTTTeo * Geo * Geo * | XXXXXXXXXXXXXXXXXXXO | |
| | | Teo * Aeo * A * T * m5C * m5C * A * m5C * T | | |
| | | * T * T * m5C * Aeo * Geo * Aeo * Geo * | | |
| | | GeoL003Mod001 | | |
| WV- | TGUCCAGCUUUAUUGG | VPT * SfG * SmUfC * SmCfA * SmGfC * SmU * | SSO SO SO SSSO | 1286 |
| 8064 | GAGTUTTTTTGG | SfU * SmUfA * SmU * SfU * SmG * SfG * SmG | SSSSSSSSSOOOOO | |
| | TAATCCACTTTCAGAGG | * SfA * SmG * STGaNC6T * SmUTTTTTeo * Geo | XXXXXXXXXXXXXXXXXXX | |
| | | * Geo * Teo * Aeo * A * T * m5C * m5C * A * | | |
| | | m5C * T * T * T * m5C * Aeo * Geo * Aeo * | | |
| | | Geo * Geo | | |
| WV- | TGUCCAGCUUUAUUGG | VPT * fG * mUfC * mCfA * mGfC * mUfU * | XXO XO XO XO XO XO | 1287 |
| 8062 | GAGTUTTTTTGG | mUfA * mUfU * mG * fG * mG * fA * mG * | XXXXXXXOOOOO | |
| | TAATCCACTTTCAGAGG | TGaNC6T * mUTTTTTeo * Geo * Geo * Teo * | XXXXXXXXXXXXXXXXXXX | |
| | | Aeo * A * T * m5C * m5C * A * m5C * T * T * T | | |
| | | * m5C * Aeo * Geo * Aeo * Geo * Geo | | |
| WV- | TGUCCAGCUUUAUUGGGAGT | VPT * SfG * SmUfC * SmCfA * SmGfC * SmU * | SSOSOSOSSSOSSSSSSSSSO | 1288 |
| 8064 | UTT | SfU * SmUfA * SmU * SfU * SmG * SfG * SmG | O | |
| | TTTGGTAATCCACTTTCAGAGG | * SfA * SmG * STGaNC6T * SmUTTTTTeo * Geo | OOOXXXXXXXXXXXXXXXXX | |
| | | * Geo * Teo * Aeo * A * T * m5C * m5C * A * | XX | |
| | | m5C * T * T * T * m5C * Aeo * Geo * Aeo * | | |
| | | Geo * Geo | | |
| WV- | TGUCCAGCUUUAUUGGGAGT | VPT * SfG * SmUfC * SmCfA * SmGfC * SmU * | SSOSOSOSSSOSSSSSSSSSO | 1289 |
| 8066 | UTT | SfU * SmUfA * SmU * SfU * SmG * SfG * SmG | O | |
| | TTTGGTAATCCACTTTCAGAGG | * SfA * SmG * ST * SmUTTTTTeo * Geo * Geo * | OOOXXXXXXXXXXXXXXXXX | |
| | | Teo * Aeo * A * T * m5C * m5C * A * m5C * T | XXO | |
| | | * T * T * m5C * Aeo * Geo * Aeo * Geo * | | |
| | | GeoL003Mod001 | | |
| WV- | TGUCCAGCUUUAUUGGGAGT | T * SfG * SmUfC * SmCfA * SmGfC * SmU * SfU | SSOSOSOSSSOSSSSSSSSSO | 1290 |
| 8068 | UTT | * SmUfA * SmU * SfU * SmG * SfG * SmG * SfA | O | |
| | TTTGGTAATCCACTTTCAGAGG | * SmG * STGaNC6T * SmUTTTTTeo * Geo * | OOOXXXXXXXXXXXXXXXXX | |
| | | Geo * Teo * Aeo * A * T * m5C * m5C * A * | XX | |
| | | m5C * T * T * T * m5C * Aeo * Geo * Aeo * | | |
| | | Geo * Geo | | |
| WV- | TGUCCAGCUUUAUUGGGAGT | T * SfG * SmUfC * SmCfA * SmGfC * SmU * SfU | SSOSOSOSSSOSSSSSSSSSO | 1291 |
| 8070 | UTTT | * SmUfA * SmU * SfU * SmG * SfG * SmG * SfA | O | |
| | TTGGTAATCCACTTTCAGAGG | * SmG * ST * SmUTTTTTeo * Geo * Geo * Teo | OOOXXXXXXXXXXXXXXXXX | |
| | | * Aeo * A * T * m5C * m5C * A * m5C * T * T * | XXO | |
| | | T * m5C * Aeo * Geo * Aeo * Geo * | | |
| | | GeoL003Mod001 | | |
| WV- | TGUCCAGCUUUAUUGGGAGG | P05MRdT * SfG * SmUfC * SmCfA * SmGfC * | SSOSOSOSSSOSSSSSSSSSS | 1292 |
| 8242 | CTU | SmU * SfU * SmUfA * SmU * SfU * SmG * SfG | S | |
| | | * SmG * SfA * SmG * SfG * SmC * STGaNC6T * | | |
| | | SmU | | |
| WV- | TAGCUUCUUGUCCAGCUUUA | PO5MRdT * SfA * SmGfC * SmU * SfU * SmC * | SSOSSSSSSSOSOSSSSSSSSS | 1293 |
| 8243 | UTU | SfU * SmU * SfG * SmUfC * SmCfA * SmG * SfC | | |
| | | * SmU * SfU * SmU * SfA * SmU * STGaNC6T * | | |
| | | SmU | | |
| WV- | TGUCCAGCUUUAUUGGGAGT | VPT * fG * mUfC * mCfA * mGfC * mUfU * | XXOXOXOXOXOXOXXXXXX | 1294 |
| 8254 | UT | mUfA * mUfU * mG * fG * mG * fA * mG * | X | |
| | TTTTGGTAATCCACTTTCAGAG | AMC6T * mUTTTTTeo * Geo * Geo * Teo * Aeo | OOOOXXXXXXXXXXXXXX | |
| | G | * A * T * m5C * m5C * A * m5C * T * T * T * | XXXXX | |
| | | m5C * Aeo * Geo * Aeo * Geo * Geo | | |
| WV- | TGUCCAGCUUUAUUGGGAGG | PO5MRdT * SfG * SmUfC * SmCfA * SmGfC * | SSOSOSOSSSOSSSSSSSSSSS | 1295 |
| 8261 | CTU | SmU * SfU * SmUfA * SmU * SfU * SmG * SfG | | |
| | | * SmG * SfA * SmG * SfG * SmC * SAMC6T * | | |
| | | SmU | | |
| WV- | TAGCUUCUUGUCCAGCUUUA | PO5MRdT * SfA * SmGfC * SmU * SfU * SmC * | SSOSSSSSSSOSOSSSSSSSSS | 1296 |
| 8262 | UTU | SfU * SmU * SfG * SmUfC * SmCfA * SmG * SfC | | |
| | | * SmU * SfU * SmU * SfA * SmU * SAMC6T * | | |
| | | SmU | | |
| WV- | TGUCCAGCUUUAUUGGGAGG | PS5MRdT * SfG * SmUfC * SmCfA * SmGfC * | SSOSOSOSSSOSSSSSSSSSSS | 1297 |
| 8281 | CTU | SmU * SfU * SmUfA * SmU * SfU * SmG * SfG | | |
| | | * SmG * SfA * SmG * SfG * SmC * STGaNC6T * | | |
| | | SmU | | |
| WV- | TGUCCAGCUUUAUUGGGAGG | PH5MRdT * SfG * SmUfC * SmCfA * SmGfC * | SSOSOSOSSSOSSSSSSSSSSS | 1298 |
| 8282 | CTU | SmU * SfU * SmUfA * SmU * SfU * SmG * SfG | | |
| | | * SmG * SfA * SmG * SfG * SmC * STGaNC6T * | | |
| | | SmU | | |
| WV- | TGUCCAGCUUUAUUGGGAGG | 5MRdT * SfG * SmUfC * SmCfA * SmGfC * | SSOSOSOSSSOSSSSSSSSSSS | 1299 |
| 8283 | CTU | SmU * SfU * SmUfA * SmU * SfU * SmG * SfG | | |
| | | * SmG * SfA * SmG * SfG * SmC * STGaNC6T * | | |
| | | SmU | | |
| WV- | TGUCCAGCUUUAUUGGGAGG | PS5MRdT * SfG * SmUfC * SmCfA * SmGfC * | SSOSOSOSSSOSSSSSSSSSSS | 1300 |
| 8284 | CTU | SmU * SfU * SmUfA * SmU * SfU * SmG * SfG | | |
| | | * SmG * SfA * SmG * SfG * SmC * SAMC6T * | | |
| | | SmU | | |
| WV- | TGUCCAGCUUUAUUGGGAGG | PH5MRdT * SfG * SmUfC * SmCfA * SmGfC * | SSOSOSOSSSOSSSSSSSSSSS | 1301 |
| 8285 | CTU | SmU * SfU * SmUfA * SmU * SfU * SmG * SfG | | |
| | | * SmG * SfA * SmG * SfG * SmC * SAMC6T * | | |
| | | SmU | | |
| WV- | TGUCCAGCUUUAUUGGGAGG | 5MRdT * SfG * SmUfC * SmCfA * SmGfC * | SSOSOSOSSSOSSSSSSSSSSS | 1302 |
| 8286 | CTU | SmU * SfU * SmUfA * SmU * SfU * SmG * SfG | | |
| | | * SmG * SfA * SmG * SfG * SmC * SAMC6T * | | |
| | | SmU | | |
| WV- | TGUCCAGCUUUAUUGGGAGG | Mod001L001T * fG * mUfC * mCfA * mGfC * | OXXOXOXOXOXOXOXXXXX | 1303 |
| 8325 | CTU | mUfU * mUfA * mUfU * mG * fG * mG * fA * | XXXX | |
| | | mG * fG * mC * T * mU | | |
| WV- | TGUCCAGCUUUAUUGGGAGG | Mod001L001 * T * fG * mUfC * mCfA * mGfC * | XXXOXOXOXOXOXOXXXXX | 1304 |
| 8326 | CTU | mUfU * mUfA * mUfU * mG * fG * mG * fA * | XXXX | |
| | | mG * fG * mC * T * mU | | |
| WV- | TAGCUUCUUGUCCAGCUUUA | Mod001L001T * fA * mGfC * mUfU * mCfU * | OXXOXOXOXOXOXOXXXXX | 1305 |
| 8327 | UTU | mUfG * mUfC * mCfA * mG * fC * mU * fU * | XXXX | |
| | | mU * fA * mU * T * mU | | |
| WV- | TAGCUUCUUGUCCAGCUUUA | Mod001L001 * T * fA * mGfC * mUfU * mCfU | XXXOXOXOXOXOXOXXXXX | 1306 |
| 8328 | UTU | * mUfG * mUfC * mCfA * mG * fC * mU * fU * | XXXX | |
| | | mU * fA * mU * T * mU | | |
| WV- | TGUCCAGCUUUAUUGGGAGG | L001T * fG * mUfC * mCfA * mGfC * mUfU * | OXXOXOXOXOXOXOXXXXX | 1307 |
| 8330 | CTU | mUfA * mUfU * mG * fG * mG * fA * mG * fG | XXXX | |
| | | * mC * T * mU | | |
| WV- | TGUCCAGCUUUAUUGGGAGG | L001 * T * fG * mUfC * mCfA * mGfC * mUfU * | XXXOXOXOXOXOXOXXXXX | 1308 |
| 8331 | CTU | mUfA * mUfU * mG * fG * mG * fA * mG * fG | XXXX | |
| | | * mC * T * mU | | |
| WV- | TAGCUUCUUGUCCAGCUUUA | L001T * fA * mGfC * mUfU * mCfU * mUfG * | OXXOXOXOXOXOXOXXXXX | 1309 |
| 8332 | UTU | mUfC * mCfA * mG * fC * mU * fU * m U * fA * | XXXX | |
| | | mU * T * mU | | |
| WV- | TAGCUUCUUGUCCAGCUUUA | L001 * T * fA * mGfC * mUfU * mCfU * mUfG * | XXXOXOXOXOXOXOXXXXX | 1310 |
| 8333 | UTU | mUfC * mCfA * mG * fC * mU * fU * m U * fA * | XXXX | |
| | | mU * T * mU | | |
| WV- | TGUCCAGCUUUAUUGGGAGG | T * fG * mUmC * mCmA * mGmC * mU * mU * | XXOXOXOXXXOXXXXXXXXX | 1311 |
| 8427 | CTU | mUmA * mU * fU * mG * mG * mG * mA * mG | XX | |
| | | * mG * mC * T * mU | | |
| WV- | TAGCUUCUUGUCCAGCUUUA | T * fA * mGmC * mU * mU * mC * mU * mU * | XXOXXXXXXXOXOXXXXXXX | 1312 |
| 8428 | UTU | mG * mUmC * mCfA * mG * mC * mU * mU * | XX | |
| | | mU * mA * mU * T * mU | | |
| WV- | TGUCCAGCUUUAUUGGGAGG | T * SfG * SmUmC * SmCmA * SmGmC * | SSOSOSOSOSOSOSSSSSSSS | 1313 |
| 8429 | CTU | SmUmU * SmUmA * SmUfU * SmG * SmG * | S | |
| | | SmG * SmA * SmG * SmG * SmC * ST * SmU | | |
| WV- | TAGCUUCUUGUCCAGCUUUA | T * SfA * SmGmC * SmUmU * SmCmU * | SSOSOSOSOSOSOSSSSSSSS | 1314 |
| 8430 | UTU | SmUmG * SmUmC * SmCfA * SmG * SmC * | S | |
| | | SmU * SmU * SmU * SmA * SmU * ST * SmU | | |
| WV- | TGUCCAGCUUUAUUGGGAGG | T * SfG * SmUmC * SmCmA * SmGmC * SmU * | SSOSOSOSSSOSSSSSSSSSSS | 1315 |
| 8431 | CTU | SmU * SmUmA * SmU * SfU * SmG * SmG * | | |
| | | SmG * SmA * SmG * SmG * SmC * ST * SmU | | |
| WV- | TAGCUUCUUGUCCAGCUUUA | T * SfA * SmGmC * SmU * SmU * SmC * SmU * | SSOSSSSSSSOSOSSSSSSSSS | 1316 |
| 8432 | UTU | SmU * SmG * SmUmC * SmCfA * SmG * SmC * | | |
| | | SmU * SmU * SmU * SmA * SmU * ST * SmU | | |
| WV- | AGCTUCTTGTCCAGCUUUAU | Mod001L001mA * SGeom5CeoTeomU * SC * | OSOOOSSSSRSSRSSSSSSS | 1317 |
| 8610 | | ST * ST * SG * RT * SC * SC * RA * SG * SC * | | |
| | | SmU * SmU * SmU * SmA * SmU | | |
| WV- | AGCTUCTTGTCCAGCUUUAU | Mod001L001mA * SGeom5CeoTeomU * SC * | OSOOOSSSSRSSSSSSSSSS | 1318 |
| 8611 | | ST * ST * SG * RT * SC * SC * SA * SG * SC * | | |
| | | SmU * SmU * SmU * SmA * SmU | | |
| WV- | AGCTUCTTGTCCAGCUUUAU | Mod001L001mA * SGeom5CeoTeomU * SC * | OSOOOSSSSSSSSRSSSSSS | 1319 |
| 8612 | | ST * ST * SG * ST * SC * SC * SA * RG * SC * | | |
| | | SmU * SmU * SmU * SmA * SmU | | |
| WV- | AGCTUCTTGTCCAGCUUUAU | Mod001L001mA * Geom5CeoTeomU * C * T * | OXOOOXXXXXXXXXXXXXXX | 1320 |
| 8613 | | T * G * T * C * C * A * G * C * mU * mU * mU * | | |
| | | mA * mU | | |
| WV- | AGCTUCTTGTCCAGCUUUAU | mA * SGeom5CeoTeomU * SC * ST * ST * SG * | SOOOSSSSRSSRSSSSSSS | 1321 |
| 8614 | | RT * SC * SC * RA * SG * SC * SmU * SmU * | | |
| | | SmU * SmA * SmU | | |
| WV- | AGCTUCTTGTCCAGCUUUAU | mA * SGeom5CeoTeomU * SC * ST * ST * SG * | SOOOSSSSRSSSSSSSSSS | 1322 |
| 8615 | | RT * SC * SC * SA * SG * SC * SmU * SmU * | | |
| | | SmU * SmA * SmU | | |
| WV- | AGCTUCTTGTCCAGCUUUAU | mA * SGeom5CeoTeomU * SC * ST * ST * SG * | SOOOSSSSSSSSRSSSSSS | 1323 |
| 8616 | | ST * SC * SC * SA * RG * SC * SmU * SmU * | | |
| | | SmU * SmA * SmU | | |
| WV- | AGCTUCTTGTCCAGCUUUAU | mA * Geom5CeoTeomU * C * T * T * G * T * C | XOOOXXXXXXXXXXXXXXX | 1324 |
| 8617 | | * C * A * G * C * mU * mU * mU * mA * mU | | |
| WV- | AGCTUCTTGTCCAGCUUUAU | Mod001L001mA * SGeom5CeoTeomU * SC * | OSOOOSSSSSSSRSSSSSSS | 1325 |
| 8618 | | ST * ST * SG * ST * SC * SC * RA * SG * SC * | | |
| | | SmU * SmU * SmU * SmA * SmU | | |
| WV- | AGCTUCTTGTCCAGCUUUAU | mA * SGeom5CeoTeomU * SC * ST * ST * SG * | SOOOSSSSSSSRSSSSSSS | 1326 |
| 8619 | | ST * SC * SC * RA * SG * SC * SmU * SmU * | | |
| | | SmU * SmA * SmU | | |
| WV- | AGCTUCTTGTCCAGCUUUAU | L001mA * SGeom5CeoTeomU * SC * ST * ST * | OSOOOSSSSRSSRSSSSSSS | 1327 |
| 8629 | | SG * RT * SC * SC * RA * SG * SC * SmU * SmU | | |
| | | * SmU * SmA * SmU | | |
| WV- | AGCTUCTTGTCCAGCUUUAU | L001mA * SGeom5CeoTeomU * SC * ST * ST * | OSOOOSSSSRSSSSSSSSSS | 1328 |
| 8630 | | SG * RT * SC * SC * SA * SG * SC * SmU * SmU | | |
| | | * SmU * SmA * SmU | | |
| WV- | AGCTUCTTGTCCAGCUUUAU | L001mA * SGeom5CeoTeomU * SC * ST * ST * | OSOOOSSSSSSSRSSSSSSS | 1329 |
| 8631 | | SG * ST * SC * SC * RA * SG * SC * SmU * SmU | | |
| | | * SmU * SmA * SmU | | |
| WV- | AGCTUCTTGTCCAGCUUUAU | L001mA * Geom5CeoTeomU * C * T * T * G * | OXOOOXXXXXXXXXXXXXXX | 1330 |
| 8632 | | T * C * C * A * G * C * mU * mU * mU * mA * | | |
| | | mU | | |
| WV- | CTTGTCCAGCTTTATTGGGA | Mod001L001m5Ceo * STeoTeoGeoTeo * SC * | OSOOOSSSSSRSSRSSOOOS | 1331 |
| 8633 | | SC * SA * SG * SC * RT * ST * ST * RA * ST * | | |
| | | STeoGeoGeoGeo * SAeo | | |
| WV- | CTTGTCCAGCTTTATTGGGA | Mod001L001m5Ceo * STeoTeoGeoTeo * SC * | OSOOOSSSSSRSSSSSOOOS | 1332 |
| 8634 | | SC * SA * SG * SC * RT * ST * ST * SA * ST * | | |
| | | STeoGeoGeoGeo * SAeo | | |
| WV- | CTTGTCCAGCTTTATTGGGA | Mod001L001m5Ceo * STeoTeoGeoTeo * SC * | OSOOOSSSSSSSSRSSOOOS | 1333 |
| 8635 | | SC * SA * SG * SC * ST * ST * ST * RA * ST * | | |
| | | STeoGeoGeoGeo * SAeo | | |
| WV- | CTTGTCCAGCTTTATTGGGA | Mod001L001m5Ceo * TeoTeoGeoTeo * C * C | OXOOOXXXXXXXXXXXOOO | 1334 |
| 8636 | | * A * G * C * T * T * T * A * T * | X | |
| | | TeoGeoGeoGeo * Aeo | | |
| WV- | CTTGTCCAGCTTTATUGGGA | Mod001L001m5Ceo * STeoTeoGeoTeo * SC * | OSOOOSSSSSRSSRSSSSSS | 1335 |
| 8637 | | SC * SA * SG * SC * RT * ST * ST * RA * ST * | | |
| | | SmU * SmG * SmG * SmG * SmA | | |
| WV- | CTTGTCCAGCTTTATUGGGA | Mod001L001m5Ceo * STeoTeoGeoTeo * SC * | OSOOOSSSSSRSSSSSSSSS | 1336 |
| 8638 | | SC * SA * SG * SC * RT * ST * ST * SA * ST * | | |
| | | SmU * SmG * SmG * SmG * SmA | | |
| WV- | CTTGTCCAGCTTTATUGGGA | Mod001L001m5Ceo * STeoTeoGeoTeo * SC * | OSOOOSSSSSSSSRSSSSSS | 1337 |
| 8639 | | SC * SA * SG * SC * ST * ST * ST * RA * ST * | | |
| | | SmU * SmG * SmG * SmG * SmA | | |
| WV- | CTTGTCCAGCTTTATUGGGA | Mod001L001m5Ceo * TeoTeoGeoTeo * C * C | OXOOOXXXXXXXXXXXXXXX | 1338 |
| 8640 | | * A * G * C * T * T * T * A * T * mU * mG * mG | | |
| | | * mG * mA | | |
| WV- | ATAGCAGCTTCTTGTCCAGC | Mod001L001Aeo * STeoAeoGeom5Ceo * SA * | OSOOOSSSSSRSSRSSOOOS | 1339 |
| 8641 | | SG * SC * ST * ST * RC * ST * ST * RG * ST * | | |
| | | Sm5Ceom5CeoAeoGeo * 5m5CeO | | |
| WV- | ATAGCAGCTTCTTGTCCAGC | Mod001L001Aeo * STeoAeoGeom5Ceo * SA * | OSOOOSSSSSRSSSSSOOOS | 1340 |
| 8642 | | SG * SC * ST * ST * RC * ST * ST * SG * ST * | | |
| | | Sm5Ceom5CeoAeoGeo * 5m5CeO | | |
| WV- | ATAGCAGCTTCTTGTCCAGC | Mod001L001Aeo * STeoAeoGeom5Ceo * SA * | OSOOOSSSSSSSSRSSOOOS | 1341 |
| 8643 | | SG * SC * ST * ST * SC * ST * ST * RG * ST * | | |
| | | Sm5Ceom5CeoAeoGeo * 5m5CeO | | |
| WV- | ATAGCAGCTTCTTGTCCAGC | Mod001L001Aeo * TeoAeoGeom5Ceo * A * G | OXOOOXXXXXXXXXXXOOO | 1342 |
| 8644 | | * C * T * T * C * T * T * G * T * | X | |
| | | m5Ceom5CeoAeoGeo * m5Ceo | | |
| WV- | ATAGCAGCTTCTTGTCCAGC | Mod001L001Aeo * STeoAeoGeom5Ceo * SA * | OSOOOSSSSSRSSRSSSSSS | 1343 |
| 8645 | | SG * SC * ST * ST * RC * ST * ST * RG * ST * | | |
| | | Sm5C * Sm5C * SmA * SmG * Sm5C | | |
| WV- | ATAGCAGCTTCTTGTCCAGC | Mod001L001Aeo * STeoAeoGeom5Ceo * SA * | OSOOOSSSSSRSSSSSSSSS | 1344 |
| 8646 | | SG * SC * ST * ST * RC * ST * ST * SG * ST * | | |
| | | Sm5C * Sm5C * SmA * SmG * Sm5C | | |
| WV- | ATAGCAGCTTCTTGTCCAGC | Mod001L001Aeo * STeoAeoGeom5Ceo * SA * | OSOOOSSSSSSSSRSSSSSS | 1345 |
| 8647 | | SG * SC * ST * ST * SC * ST * ST * RG * ST * | | |
| | | Sm5C * Sm5C * SmA * SmG * Sm5C | | |
| WV- | ATAGCAGCTTCTTGTCCAGC | Mod001L001Aeo * TeoAeoGeom5Ceo * A * G | OXOOOXXXXXXXXXXXXXXX | 1346 |
| 8648 | | * C * T * T * C * T * T * G * T * m5C * m5C * | | |
| | | mA * mG * m5C | | |
| WV- | CTTGTCCAGCTTTATTGGGA | m5Ceo * STeoTeoGeoTeo * SC * SC * SA * SG | SOOOSSSSSRSSRSSOOOS | 1347 |
| 8649 | | * SC * RT * ST * ST * RA * ST * | | |
| | | STeoGeoGeoGeo * SAeo | | |
| WV- | CTTGTCCAGCTTTATTGGGA | m5Ceo * STeoTeoGeoTeo * SC * SC * SA * SG | SOOOSSSSSRSSSSSOOOS | 1348 |
| 8650 | | * SC * RT * ST * ST * SA * ST * | | |
| | | STeoGeoGeoGeo * SAeo | | |
| WV- | CTTGTCCAGCTTTATTGGGA | m5Ceo * STeoTeoGeoTeo * SC * SC * SA * SG | SOOOSSSSSSSSRSSOOOS | 1349 |
| 8651 | | * SC * ST * ST * ST * RA * ST * | | |
| | | STeoGeoGeoGeo * SAeo | | |
| WV- | CTTGTCCAGCTTTATTGGGA | m5Ceo * TeoTeoGeoTeo * C * C * A * G * C * T | XOOOXXXXXXXXXXXOOOX | 1350 |
| 8652 | | * T * T * A * T * TeoGeoGeoGeo * Aeo | | |
| WV- | CTTGTCCAGCTTTATUGGGA | m5Ceo * STeoTeoGeoTeo * SC * SC * SA * SG | SOOOSSSSSRSSRSSSSSS | 1351 |
| 8653 | | * SC * RT * ST * ST * RA * ST * SmU * SmG * | | |
| | | SmG * SmG * SmA | | |
| WV- | CTTGTCCAGCTTTATUGGGA | m5Ceo * STeoTeoGeoTeo * SC * SC * SA * SG | SOOOSSSSSRSSSSSSSSS | 1352 |
| 8654 | | * SC * RT * ST * ST * SA * ST * SmU * SmG * | | |
| | | SmG * SmG | * SmA | |
| WV- | CTTGTCCAGCTTTATUGGGA | m5Ceo * STeoTeoGeoTeo * SC * SC * SA * SG | SOOOSSSSSSSSRSSSSSS | 1353 |
| 8655 | | * SC * ST * ST * ST * RA * ST * SmU * SmG * | | |
| | | SmG * SmG * SmA | | |
| WV- | CTTGTCCAGCTTTATUGGGA | m5Ceo * TeoTeoGeoTeo * C * C * A * G * C * T | XOOOXXXXXXXXXXXXXXX | 1354 |
| 8656 | | * T * T * A * T * mU * mG * mG * mG * mA | | |
| WV- | ATAGCAGCTTCTTGTCCAGC | Aeo * STeoAeoGeom5Ceo * SA * SG * SC * ST | SOOOSSSSSRSSRSSOOOS | 1355 |
| 8657 | | * ST * RC * ST * ST * RG * ST * | | |
| | | Sm5Ceom5CeoAeoGeo * Sm5Ceo | | |
| WV- | ATAGCAGCTTCTTGTCCAGC | Aeo * STeoAeoGeom5Ceo * SA * SG * SC * ST | SOOOSSSSSRSSSSSOOOS | 1356 |
| 8658 | | * ST * RC * ST * ST * SG * ST * | | |
| | | Sm5Ceom5CeoAeoGeo * 5m5CeO | | |
| WV- | ATAGCAGCTTCTTGTCCAGC | Aeo * STeoAeoGeom5Ceo * SA * SG * SC * ST | SOOOSSSSSSSSRSSOOOS | 1357 |
| 8659 | | * ST * SC * ST * ST * RG * ST * | | |
| | | Sm5Ceom5CeoAeoGeo * 5m5CeO | | |
| WV- | ATAGCAGCTTCTTGTCCAGC | Aeo * TeoAeoGeom5Ceo * A * G * C * T * T * | XOOOXXXXXXXXXXXOOOX | 1358 |
| 8660 | | C * T * T * G * T * m5Ceom5CeoAeoGeo * | | |
| | | m5Ceo | | |
| WV- | ATAGCAGCTTCTTGTCCAGC | Aeo * STeoAeoGeom5Ceo * SA * SG * SC * ST | SOOOSSSSSRSSRSSSSSS | 1359 |
| 8661 | | * ST * RC * ST * ST * RG * ST * Sm5C * Sm5C * | | |
| | | SmA * SmG * Sm5C | | |
| WV- | ATAGCAGCTTCTTGTCCAGC | Aeo * STeoAeoGeom5Ceo * SA * SG * SC * ST | SOOOSSSSSRSSSSSSSSS | 1360 |
| 8662 | | * ST * RC * ST * ST * SG * ST * Sm5C * Sm5C * | | |
| | | SmA * SmG * Sm5C | | |
| WV- | ATAGCAGCTTCTTGTCCAGC | Aeo * STeoAeoGeom5Ceo * SA * SG * SC * ST | SOOOSSSSSSSSRSSSSSS | 1361 |
| 8663 | | * ST * SC * ST * ST * RG * ST * Sm5C * Sm5C * | | |
| | | SmA * SmG * Sm5C | | |
| WV- | ATAGCAGCTTCTTGTCCAGC | Aeo * TeoAeoGeom5Ceo * A * G * C * T * T * | XOOOXXXXXXXXXXXXXXX | 1362 |
| 8664 | | C * T * T * G * T * m5C * m5C * mA * mG * | | |
| | | m5C | | |
| WV- | ATAGCAGCTTCTTGTCCAGC | Mod001L001Aeo * STeoAeoGeom5Ceo * SA * | OSOOOSSSSSRSSRSSSSSS | 1363 |
| 8665 | | SG * SC * ST * ST * RC * ST * ST * RG * ST * | | |
| | | SmC * SmC * SmA * SmG * SmC | | |
| WV- | ATAGCAGCTTCTTGTCCAGC | Mod001L001Aeo * STeoAeoGeom5Ceo * SA * | OSOOOSSSSSRSSSSSSSSS | 1364 |
| 8666 | | SG * SC * ST * ST * RC * ST * ST * SG * ST * | | |
| | | SmC * SmC * SmA * SmG * SmC | | |
| WV- | ATAGCAGCTTCTTGTCCAGC | Mod001L001Aeo * STeoAeoGeom5Ceo * SA * | OSOOOSSSSSSSSRSSSSSS | 1365 |
| 8667 | | SG * SC * ST * ST * SC * ST * ST * RG * ST * | | |
| | | SmC * SmC * SmA * SmG * SmC | | |
| WV- | ATAGCAGCTTCTTGTCCAGC | Mod001L001Aeo * TeoAeoGeom5Ceo * A * G | OXOOOXXXXXXXXXXXXXXX | 1366 |
| 8668 | | * C * T * T * C * T * T * G * T * mC * mC * mA | | |
| | | mG * mC | | |
| WV- | ATAGCAGCTTCTTGTCCAGC | Aeo * STeoAeoGeom5Ceo * SA * SG * SC * ST | SOOOSSSSSRSSRSSSSSS | 1367 |
| 8669 | | * ST * RC * ST * ST * RG * ST * SmC * SmC * | | |
| | | SmA * SmG * SmC | | |
| WV- | ATAGCAGCTTCTTGTCCAGC | Aeo * STeoAeoGeom5Ceo * SA * SG * SC * ST | SOOOSSSSSRSSSSSSSSS | 1368 |
| 8670 | | * ST * RC * ST * ST * SG * ST * SmC * SmC * | | |
| | | SmA * SmG * SmC | | |
| WV- | ATAGCAGCTTCTTGTCCAGC | Aeo * STeoAeoGeom5Ceo * SA * SG * SC * ST | SOOOSSSSSSSSRSSSSSS | 1369 |
| 8671 | | * ST * SC * ST * ST * RG * ST * SmC * SmC * | | |
| | | SmA * SmG * SmC | | |
| WV- | ATAGCAGCTTCTTGTCCAGC | Aeo * TeoAeoGeom5Ceo * A * G * C * T * T * | XOOOXXXXXXXXXXXXXXX | 1370 |
| 8672 | | C * T * T * G * T * mC * mC * mA * mG * mC | | |
| WV- | CTTGUCCAGCTTTATUGGGA | Mod001L001mC * STeoTeoGeomU * SC * SC * | OSOOOSSSSSRSSRSSSSSS | 1371 |
| 8673 | | SA * SG * SC * RT * ST * ST * RA * ST * SmU * | | |
| | | SmG * SmG * SmG * SmA | | |
| WV- | CTTGUCCAGCTTTATUGGGA | Mod001L001mC * STeoTeoGeomU * SC * SC * | OSOOOSSSSSRSSSSSSSSS | 1372 |
| 8674 | | SA * SG * SC * RT * ST * ST * SA * ST * SmU * | | |
| | | SmG * SmG * SmG * SmA | | |
| WV- | CTTGUCCAGCTTTATUGGGA | Mod001L001mC * STeoTeoGeomU * SC * SC * | OSOOOSSSSSSSSRSSSSSS | 1373 |
| 8675 | | SA * SG * SC * ST * ST * ST * RA * ST * SmU * | | |
| | | SmG * SmG * SmG * SmA | | |
| WV- | CTTGUCCAGCTTTATUGGGA | Mod001L001mC * TeoTeoGeomU * C * C * A * | OXOOOXXXXXXXXXXXXXXX | 1374 |
| 8676 | | G * C * T * T * T * A * T * mU * mG * mG * mG | | |
| | | * mA | | |
| WV- | ATAGCAGCTTCTTGTCCAGC | Mod001L001mA * STeoAeoGeomC * SA * SG * | OSOOOSSSSSRSSRSSSSSS | 1375 |
| 8677 | | SC * ST * ST * RC * ST * ST * RG * ST * SmC * | | |
| | | SmC * SmA * SmG * SmC | | |
| WV- | ATAGCAGCTTCTTGTCCAGC | Mod001L001mA * STeoAeoGeomC * SA * SG * | OSOOOSSSSSRSSSSSSSSS | 1376 |
| 8678 | | SC * ST * ST * RC * ST * ST * SG * ST * SmC * | | |
| | | SmC * SmA * SmG * SmC | | |
| WV- | ATAGCAGCTTCTTGTCCAGC | Mod001L001mA * STeoAeoGeomC * SA * SG * | OSOOOSSSSSSSSRSSSSSS | 1377 |
| 8679 | | SC * ST * ST * SC * ST * ST * RG * ST * SmC * | | |
| | | SmC * SmA * SmG * SmC | | |
| WV- | ATAGCAGCTTCTTGTCCAGC | Mod001L001mA * TeoAeoGeomC * A * G * C | OXOOOXXXXXXXXXXXXXXX | 1378 |
| 8680 | | * T * T * C * T * T * G * T * mC * mC * mA * | | |
| | | mG * mC | | |
| WV- | CTTGUCCAGCTTTATUGGGA | mC * STeoTeoGeomU * SC * SC * SA * SG * SC | SOOOSSSSSRSSRSSSSSS | 1379 |
| 8681 | | * RT * ST * ST * RA * ST * SmU * SmG * SmG * | | |
| | | SmG * SmA | | |
| WV- | CTTGUCCAGCTTTATUGGGA | mC * STeoTeoGeomU * SC * SC * SA * SG * SC | SOOOSSSSSRSSSSSSSSS | 1380 |
| 8682 | | * RT * ST * ST * SA * ST * SmU * SmG * SmG * | | |
| | | SmG * SmA | | |
| WV- | CTTGUCCAGCTTTATUGGGA | mC * STeoTeoGeomU * SC * SC * SA * SG * SC | SOOOSSSSSSSSRSSSSSS | 1381 |
| 8683 | | * ST * ST * ST * RA * ST * SmU * SmG * SmG * | | |
| | | SmG * SmA | | |
| WV- | CTTGUCCAGCTTTATUGGGA | mC * TeoTeoGeomU * C * C * A * G * C * T * T | XOOOXXXXXXXXXXXXXXX | 1382 |
| 8684 | | * T * A * T * mU * mG * mG * mG * mA | | |
| WV- | ATAGCAGCTTCTTGTCCAGC | mA * STeoAeoGeomC * SA * SG * SC * ST * ST | SOOOSSSSSRSSRSSSSSS | 1383 |
| 8685 | | * RC * ST * ST * RG * ST * SmC * SmC * SmA * | | |
| | | SmG * SmC | | |
| WV- | ATAGCAGCTTCTTGTCCAGC | mA * STeoAeoGeomC * SA * SG * SC * ST * ST | SOOOSSSSSRSSSSSSSSS | 1384 |
| 8686 | | * RC * ST * ST * SG * ST * SmC * SmC * SmA * | | |
| | | SmG * SmC | | |
| WV- | ATAGCAGCTTCTTGTCCAGC | mA * STeoAeoGeomC * SA * SG * SC * ST * ST | SOOOSSSSSSSSRSSSSSS | 1385 |
| 8687 | | * SC * ST * ST * RG * ST * SmC * SmC * SmA * | | |
| | | SmG * SmC | | |
| WV- | ATAGCAGCTTCTTGTCCAGC | mA * TeoAeoGeomC * A * G * C * T * T * C * T | XOOOXXXXXXXXXXXXXXX | 1386 |
| 8688 | | * T * G * T * mC * mC * mA * mG * mC | | |
| WV- | CTTGTCCAGCTTTATTGGGA | L001m5Ceo * STeoTeoGeoTeo * SC * SC * SA * | OSOOOSSSSSRSSRSSOOOS | 1387 |
| 8822 | | SG * SC * RT * ST * ST * RA * ST * | | |
| | | STeoGeoGeoGeo * SAeo | | |
| WV- | CTTGTCCAGCTTTATTGGGA | L001m5Ceo * STeoTeoGeoTeo * SC * SC * SA * | OSOOOSSSSSRSSSSSOOOS | 1388 |
| 8823 | | SG * SC * RT * ST * ST * SA * ST * | | |
| | | STeoGeoGeoGeo * SAeo | | |
| WV- | CTTGTCCAGCTTTATTGGGA | L001m5Ceo * STeoTeoGeoTeo * SC * SC * SA * | OSOOOSSSSSSSSRSSOOOS | 1389 |
| 8824 | | SG * SC * ST * ST * ST * RA * ST * | | |
| | | STeoGeoGeoGeo * SAeo | | |
| WV- | CTTGTCCAGCTTTATTGGGA | L001m5Ceo * TeoTeoGeoTeo * C * C * A * G * | OXOOOXXXXXXXXXXXOOO | 1390 |
| 8825 | | C * T * T * T * A * T * TeoGeoGeoGeo * Aeo | X | |
| WV- | CTTGUCCAGCTTTATUGGGA | L001mC * STeoTeoGeomU * SC * SC * SA * SG | OSOOOSSSSSRSSRSSSSSS | 1391 |
| 8826 | | * SC * RT * ST * ST * RA * ST * SmU * SmG * | | |
| | | SmG * SmG * SmA | | |
| WV- | CTTGUCCAGCTTTATUGGGA | L001mC * STeoTeoGeomU * SC * SC * SA * SG | OSOOOSSSSSRSSSSSSSSS | 1392 |
| 8827 | | * SC * RT * ST * ST * SA * ST * SmU * SmG * | | |
| | | SmG * SmG * SmA | | |
| WV- | CTTGUCCAGCTTTATUGGGA | L001mC * STeoTeoGeomU * SC * SC * SA * SG | OSOOOSSSSSSSSRSSSSSS | 1393 |
| 8828 | | * SC * ST * ST * ST * RA * ST * SmU * SmG * | | |
| | | SmG * SmG * SmA | | |
| WV- | CTTGUCCAGCTTTATUGGGA | L001mC * TeoTeoGeomU * C * C * A * G * C * | OXOOOXXXXXXXXXXXXXXX | 1394 |
| 8829 | | T * T * T * A * T * mU * mG * mG * mG * mA | | |
| WV- | ATAGCAGCTTCTTGTCCAGC | L001Aeo * STeoAeoGeom5Ceo * SA * SG * SC | OSOOOSSSSSRSSRSSOOOS | 1395 |
| 8830 | | * ST * ST * RC * ST * ST * RG * ST * | | |
| | | Sm5Ceom5CeoAeoGeo * Sm5Ceo | | |
| WV- | ATAGCAGCTTCTTGTCCAGC | L001Aeo * STeoAeoGeom5Ceo * SA * SG * SC | OSOOOSSSSSRSSSSSOOOS | 1396 |
| 8831 | | * ST * ST * RC * ST * ST * SG * ST * | | |
| | | Sm5Ceom5CeoAeoGeo * Sm5Ceo | | |
| WV- | ATAGCAGCTTCTTGTCCAGC | L001Aeo * STeoAeoGeom5Ceo * SA * SG * SC | OSOOOSSSSSSSSRSSOOOS | 1397 |
| 8832 | | * ST * ST * SC * ST * ST * RG * ST * | | |
| | | Sm5Ceom5CeoAeoGeo * Sm5Ceo | | |
| WV- | ATAGCAGCTTCTTGTCCAGC | L001Aeo * TeoAeoGeom5Ceo * A * G * C * T * | OXOOOXXXXXXXXXXXOOO | 1398 |
| 8833 | | T * C * T * T * G * T * m5Ceom5CeoAeoGeo * | X | |
| | | m5Ceo | | |
| WV- | ATAGCAGCTTCTTGTCCAGC | L001mA * STeoAeoGeomC * SA * SG * SC * ST | OSOOOSSSSSRSSRSSSSSS | 1399 |
| 8834 | | * ST * RC * ST * ST * RG * ST * SmC * SmC * | | |
| | | SmA * SmG * SmC | | |
| WV- | ATAGCAGCTTCTTGTCCAGC | L001mA * STeoAeoGeomC * SA * SG * SC * ST | OSOOOSSSSSRSSSSSSSSS | 1400 |
| 8835 | | * ST * RC * ST * ST * SG * ST * SmC * SmC * | | |
| | | SmA * SmG * SmC | | |
| WV- | ATAGCAGCTTCTTGTCCAGC | L001mA * STeoAeoGeomC * SA * SG * SC * ST | OSOOOSSSSSSSSRSSSSSS | 1401 |
| 8836 | | * ST * SC * ST * ST * RG * ST * SmC * SmC * | | |
| | | SmA * SmG * SmC | | |
| WV- | ATAGCAGCTTCTTGTCCAGC | L001mA * TeoAeoGeomC * A * G * C * T * T * | OXOOOXXXXXXXXXXXXXXX | 1402 |
| 8837 | | C * T * T * G * T * mC * mC * mA * mG * mC | | |
| WV- | TGUCCAGCUUUAUUGGGAGG | Mod001L001T * SfG * SmUfC * SmCfA * | OSSOSOSOSSSOSSSSSSSSS | 1403 |
| 8918 | CTU | SmGfC * SmU * SfU * SmUfA * SmU * SfU * | SS | |
| | | SmG * SfG * SmG * SfA * SmG * SfG * SmC * | | |
| | | ST * SmU | | |
| WV- | TGUCCAGCUUUAUUGGGAGG | Mod001L0015MRdT * SfG * SmUfC * SmCfA * | OSSOSOSOSSSOSSSSSSSSS | 1404 |
| 8919 | CTU | SmGfC * SmU * SfU * SmUfA * SmU * SfU * | SS | |
| | | SmG * SfG * SmG * SfA * SmG * SfG * SmC * | | |
| | | ST * SmU | | |
| WV- | TGUCCAGCUUUAUUGGGAGG | POT * SfG * SmUfC * SmCfA * SmGfC * SmU * | SSOSOSOSSSOSSSSSSSSSSS | 1405 |
| 8920 | CTU | SfU * SmUfA * SmU * SfU * SmG * SfG * SmG | | |
| | | * SfA * SmG * SfG * SmC * STGaNC6T * SmU | | |
| WV- | TGUCCAGCUUUAUUGGGAGG | PO5MRdT * SfG * Spac3mUfC * SmCfA * | SSOSOSOSSSOSSSSSSSSSSS | 1406 |
| 8921 | CTU | SmGfC * SmU * SfU * SmUfA * SmU * SfU * | | |
| | | SmG * SfG * SmG * SfA * SmG * SfG * SmC * | | |
| | | STGaNC6T * SmU | | |
| WV- | TGUCCAGCUUUAUUGGGAGG | PO5MRdT * SfG * SmUfC * SmCfA * SmGfC * | SSOSOSOSXSOSSSSSSSSSSS | 1407 |
| 8922 | CTU | Spac3mU * fU * SmUfA * SmU * SfU * SmG | * | |
| | | SfG * SmG * SfA * SmG * SfG * SmC * | | |
| | | STGaNC6T * SmU | | |
| WV- | TGUCCAGCUUUAUUGGGAGG | PO5MRdT * SfG * SmUfC * SmCfA * SmGfC * | SSOSOSOSSSOSSSSSSSSSSS | 1408 |
| 8923 | CTU | SmU * SfU * Spac3mUfA * SmU * SfU * SmG * | | |
| | | SfG * SmG * SfA * SmG * SfG * SmC * | | |
| | | STGaNC6T * SmU | | |
| WV- | TGUCCAGCUUUAUUGGGAGG | PO5MRdT * SfG * SmUfC * SmCfA * SmGfC * | SSOSOSOSSSOSXSSSSSSSSS | 1409 |
| 8924 | CTU | SmU * SfU * SmUfA * Spac3mU * fU * SmG * | | |
| | | SfG * SmG * SfA * SmG * SfG * SmC * | | |
| | | STGaNC6T * SmU | | |
| WV- | TGUCCAGCUUUAUUGGGAGG | PO5MRdT * SfG * SmUfC * SmCfA * SmGfC * | SSOSOSOSSSOSSSSSSSSSSS | 1410 |
| 8925 | UTU | SmU * SfU * SmUfA * SmU * SfU * SmG * SfG | | |
| | | * SmG * SfA * SmG * SfG * Spac3mU * | | |
| | | STGaNC6T * SmU | | |
| WV- | TGUCCAGCUUUAUUGGGAGG | PO5MRdT * SfG * SmUfC * SmCfA * SmGfC * | SSOSOSOSSSOSSSSSSSSSSS | 1411 |
| 8926 | CTU | SmU * SfU * SmUfA * SmU * SfU * SmG * SfG | | |
| | | * SmG * SfA * SmG * SfG * SmC * STGaNC6T * | | |
| | | Spac3mU | | |
| WV- | TGUCCAGCUUUAUUGGGAGG | T * fG * fUmC * mCmA * mGmC * mUmU * | XXOXOXOXOXOXOXXXXXX | 1412 |
| 8938 | CTU | mUmA * mUfU * mG * mG * mG * mA * mG * | XXX | |
| | | mG * mC * T * mU | | |
| WV- | TGUCCAGCUUUAUUGGGAGG | T * fG * mUfC * mCmA * mGmC * mUmU * | XXOXOXOXOXOXOXXXXXX | 1413 |
| 8939 | CTU | mUmA * mUfU * mG * mG * mG * mA * mG * | XXX | |
| | | mG * mC * T * mU | | |
| WV- | TGUCCAGCUUUAUUGGGAGG | T * fG * mUmC * fCmA * mGmC * mUmU * | XXOXOXOXOXOXOXXXXXX | 1414 |
| 8940 | CTU | mUmA * mUfU * mG * mG * mG * mA * mG * | XXX | |
| | | mG * mC * T * mU | | |
| WV- | TGUCCAGCUUUAUUGGGAGG | T * fG * mUmC * mCfA * mGmC * mUmU * | XXOXOXOXOXOXOXXXXXX | 1415 |
| 8941 | CTU | mUmA * mUfU * mG * mG * mG * mA * mG * | XXX | |
| | | mG * mC * T * mU | | |
| WV- | TGUCCAGCUUUAUUGGGAGG | T * fG * mUmC * mCmA * fGmC * mUmU * | XXOXOXOXOXOXOXXXXXX | 1416 |
| 8942 | CTU | mUmA * mUfU * mG * mG * mG * mA * mG * | XXX | |
| | | mG * mC * T * mU | | |
| WV- | TGUCCAGCUUUAUUGGGAGG | T * fG * mUmC * mCmA * mGfC * mUmU * | XXOXOXOXOXOXOXXXXXX | 1417 |
| 8943 | CTU | mUmA * mUfU * mG * mG * mG * mA * mG * | XXX | |
| | | mG * mC * T * mU | | |
| WV- | TGUCCAGCUUUAUUGGGAGG | T * fG * fUfC * mCmA * mGmC * mUmU * | XXOXOXOXOXOXOXXXXXX | 1418 |
| 8944 | CTU | mUmA * mUfU * mG * mG * mG * mA * mG * | XXX | |
| | | mG * mC * T * mU | | |
| WV- | TGUCCAGCUUUAUUGGGAGG | T * fG * fUmC * fCmA * mGmC * mUmU * | XXOXOXOXOXOXOXXXXXX | 1419 |
| 8945 | CTU | mUmA * mUfU * mG * mG * mG * mA * mG * | XXX | |
| | | mG * mC * T * mU | | |
| WV- | TGUCCAGCUUUAUUGGGAGG | T * fG * fUmC * mCfA * mGmC * mUmU * | XXOXOXOXOXOXOXXXXXX | 1420 |
| 8946 | CTU | mUmA * mUfU * mG * mG * mG * mA * mG * | XXX | |
| | | mG * mC * T * mU | | |
| WV- | TGUCCAGCUUUAUUGGGAGG | T * fG * fUmC * mCmA * fGmC * mUmU * | XXOXOXOXOXOXOXXXXXX | 1421 |
| 8947 | CTU | mUmA * mUfU * mG * mG * mG * mA * mG * | XXX | |
| | | mG * mC * T * mU | | |
| WV- | TGUCCAGCUUUAUUGGGAGG | T * fG * fUmC * mCmA * mGfC * mUmU * | XXOXOXOXOXOXOXXXXXX | 1422 |
| 8948 | CTU | mUmA * mUfU * mG * mG * mG * mA * mG * | XXX | |
| | | mG * mC * T * mU | | |
| WV- | TGUCCAGCUUUAUUGGGAGG | T * fG * mUfC * fCmA * mGmC * mUmU * | XXOXOXOXOXOXOXXXXXX | 1423 |
| 8949 | CTU | mUmA * mUfU * mG * mG * mG * mA * mG * | XXX | |
| | | mG * mC * T * mU | | |
| WV- | TGUCCAGCUUUAUUGGGAGG | T * fG * mUfC * mCfA * mGmC * mUmU * | XXOXOXOXOXOXOXXXXXX | 1424 |
| 8950 | CTU | mUmA * mUfU * mG * mG * mG * mA * mG * | XXX | |
| | | mG * mC * T * mU | | |
| WV- | TGUCCAGCUUUAUUGGGAGG | T * fG * mUfC * mCmA * fGmC * mUmU * | XXOXOXOXOXOXOXXXXXX | 1425 |
| 8951 | CTU | mUmA * mUfU * mG * mG * mG * mA * mG * | XXX | |
| | | mG * mC * T * mU | | |
| WV- | TGUCCAGCUUUAUUGGGAGG | T * fG * mUfC * mCmA * mGfC * mUmU * | XXOXOXOXOXOXOXXXXXX | 1426 |
| 8952 | CTU | mUmA * mUfU * mG * mG * mG * mA * mG * | XXX | |
| | | mG * mC * T * mU | | |
| WV- | TGUCCAGCUUUAUUGGGAGG | T * fG * mUmC * fCfA * mGmC * mUmU * | XXOXOXOXOXOXOXXXXXX | 1427 |
| 8953 | CTU | mUmA * mUfU * mG * mG * mG * mA * mG * | XXX | |
| | | mG * mC * T * mU | | |
| WV- | TGUCCAGCUUUAUUGGGAGG | T * fG * mUmC * fCmA * fGmC * mUmU * | XXOXOXOXOXOXOXXXXXX | 1428 |
| 8954 | CTU | mUmA * mUfU * mG * mG * mG * mA * mG * | XXX | |
| | | mG * mC * T * mU | | |
| WV- | TGUCCAGCUUUAUUGGGAGG | T * fG * mUmC * fCmA * mGfC * mUmU * | XXOXOXOXOXOXOXXXXXX | 1429 |
| 8955 | CTU | mUmA * mUfU * mG * mG * mG * mA * mG * | XXX | |
| | | mG * mC * T * mU | | |
| WV- | TGUCCAGCUUUAUUGGGAGG | T * fG * mUmC * mCfA * fGmC * mUmU * | XXOXOXOXOXOXOXXXXXX | 1430 |
| 8956 | CTU | mUmA * mUfU * mG * mG * mG * mA * mG * | XXX | |
| | | mG * mC * T * mU | | |
| WV- | TGUCCAGCUUUAUUGGGAGG | T * fG * mUmC * mCfA * mGfC * mUmU * | XXOXOXOXOXOXOXXXXXX | 1431 |
| 8957 | CTU | mUmA * mUfU * mG * mG * mG * mA * mG * | XXX | |
| | | mG * mC * T * mU | | |
| WV- | TGUCCAGCUUUAUUGGGAGG | T * fG * mUmC * mCmA * fGfC * mUmU * | XXOXOXOXOXOXOXXXXXX | 1432 |
| 8958 | CTU | mUmA * mUfU * mG * mG * mG * mA * mG * | XXX | |
| | | mG * mC * T * mU | | |
| WV- | TGUCCAGCUUUAUUGGGAGG | T * fG * fUfC * fCmA * mGmC * mUmU * | XXOXOXOXOXOXOXXXXXX | 1433 |
| 8959 | CTU | mUmA * mUfU * mG * mG * mG * mA * mG * | XXX | |
| | | mG * mC * T * mU | | |
| WV- | TGUCCAGCUUUAUUGGGAGG | T * fG * fUfC * mCfA * mGmC * mUmU * | XXOXOXOXOXOXOXXXXXX | 1434 |
| 8960 | CTU | mUmA * mUfU * mG * mG * mG * mA * mG * | XXX | |
| | | mG * mC * T * mU | | |
| WV- | TGUCCAGCUUUAUUGGGAGG | T * fG * fUfC * mCmA * fGmC * mUmU * | XXOXOXOXOXOXOXXXXXX | 1435 |
| 8961 | CTU | mUmA * mUfU * mG * mG * mG * mA * mG * | XXX | |
| | | mG * mC * T * mU | | |
| WV- | TGUCCAGCUUUAUUGGGAGG | T * fG * fUfC * mCmA * mGfC * mUmU * | XXOXOXOXOXOXOXXXXXX | 1436 |
| 8962 | CTU | mUmA * mUfU * mG * mG * mG * mA * mG * | XXX | |
| | | mG * mC * T * mU | | |
| WV- | TGUCCAGCUUUAUUGGGAGG | T * fG * fUmC * fCfA * mGmC * mUmU * | XXOXOXOXOXOXOXXXXXX | 1437 |
| 8963 | CTU | mUmA * mUfU * mG * mG * mG * mA * mG * | XXX | |
| | | mG * mC * T * mU * | | |
| WV- | TGUCCAGCUUUAUUGGGAGG | T * fG * fUmC * fCmA * fGmC * mUmU * | XXOXOXOXOXOXOXXXXXX | 1438 |
| 8964 | CTU | mUmA * mUfU * mG * mG * mG * mA * mG * | XXX | |
| | | mG * mC * T * mU | | |
| WV- | TGUCCAGCUUUAUUGGGAGG | T * fG * fUmC * fCmA * mGfC * mUmU * | XXOXOXOXOXOXOXXXXXX | 1439 |
| 8965 | CTU | mUmA * mUfU * mG * mG * mG * mA * mG * | XXX | |
| | | mG * mC * T * mU | | |
| WV- | TGUCCAGCUUUAUUGGGAGG | T * fG * fUmC * mCfA * fGmC * mUmU * | XXOXOXOXOXOXOXXXXXX | 1440 |
| 8966 | CTU | mUmA * mUfU * mG * mG * mG * mA * mG * | XXX | |
| | | mG * mC * T * mU | | |
| WV- | TGUCCAGCUUUAUUGGGAGG | T * fG * fUmC * mCfA * mGfC * mUmU * | XXOXOXOXOXOXOXXXXXX | 1441 |
| 8967 | CTU | mUmA * mUfU * mG * mG * mG * mA * mG * | XXX | |
| | | mG * mC * T * mU | | |
| WV- | TGUCCAGCUUUAUUGGGAGG | T * fG * fUmC * mCmA * fGfC * mUmU * | XXOXOXOXOXOXOXXXXXX | 1442 |
| 8968 | CTU | mUmA * mUfU * mG * mG * mG * mA * mG * | XXX | |
| | | mG * mC * T * mU | | |
| WV- | TGUCCAGCUUUAUUGGGAGG | T * fG * mUfC * fCfA * mGmC * mUmU * | XXOXOXOXOXOXOXXXXXX | 1443 |
| 8969 | CTU | mUmA * mUfU * mG * mG * mG * mA * mG * | XXX | |
| | | mG * mC * T * mU | | |
| WV- | TGUCCAGCUUUAUUGGGAGG | T * fG * mUfC * fCmA * fGmC * mUmU * | XXOXOXOXOXOXOXXXXXX | 1444 |
| 8970 | CTU | mUmA * mUfU * mG * mG * mG * mA * mG * | XXX | |
| | | mG * mC * T * mU | | |
| WV- | TGUCCAGCUUUAUUGGGAGG | T * fG * mUfC * fCmA * mGfC * mUmU * | XXOXOXOXOXOXOXXXXXX | 1445 |
| 8971 | CTU | mUmA * mUfU * mG * mG * mG * mA * mG * | XXX | |
| | | mG * mC * T * mU | | |
| WV- | TGUCCAGCUUUAUUGGGAGG | T * fG * mUfC * mCfA * fGmC * mUmU * | XXOXOXOXOXOXOXXXXXX | 1446 |
| 8972 | CTU | mUmA * mUfU * mG * mG * mG * mA * mG * | XXX | |
| | | mG * mC * T * mU | | |
| WV- | TGUCCAGCUUUAUUGGGAGG | T * fG * mUfC * mCfA * mGfC * mUmU * | XXOXOXOXOXOXOXXXXXX | 1447 |
| 8973 | CTU | mUmA * mUfU * mG * mG * mG * mA * mG * | XXX | |
| | | mG * mC * T * mU | | |
| WV- | TGUCCAGCUUUAUUGGGAGG | T * fG * mUfC * mCmA * fGfC * mUmU * | XXOXOXOXOXOXOXXXXXX | 1448 |
| 8974 | CTU | mUmA * mUfU * mG * mG * mG * mA * mG * | XXX | |
| | | mG * mC * T * mU | | |
| WV- | TGUCCAGCUUUAUUGGGAGG | T * fG * mUmC * fCfA * fGmC * mUmU * | XXOXOXOXOXOXOXXXXXX | 1449 |
| 8975 | CTU | mUmA * mUfU * mG * mG * mG * mA * mG * | XXX | |
| | | mG * mC * T * mU | | |
| WV- | TGUCCAGCUUUAUUGGGAGG | T * fG * mUmC * fCfA * mGfC * mUmU * | XXOXOXOXOXOXOXXXXXX | 1450 |
| 8976 | CTU | mUmA * mUfU * mG * mG * mG * mA * mG * | XXX | |
| | | mG * mC * T * mU | | |
| WV- | TGUCCAGCUUUAUUGGGAGG | T * fG * mUmC * fCmA * fGfC * mUmU * | XXOXOXOXOXOXOXXXXXX | 1451 |
| 8977 | CTU | mUmA * mUfU * mG * mG * mG * mA * mG * | XXX | |
| | | mG * mC * T * mU | | |
| WV- | TGUCCAGCUUUAUUGGGAGG | T * fG * mUmC * mCfA * fGfC * mUmU * | XXOXOXOXOXOXOXXXXXX | 1452 |
| 8978 | CTU | mUmA * mUfU * mG * mG * mG * mA * mG * | XXX | |
| | | mG * mC * T * mU | | |
| WV- | TGUCCAGCUUUAUUGGGAGG | T * fG * fUfC * fCfA * mGmC * mUmU * | XXOXOXOXOXOXOXXXXXX | 1453 |
| 8979 | CTU | mUmA * mUfU * mG * mG * mG * mA * mG * | XXX | |
| | | mG * mC * T * mU | | |
| WV- | TGUCCAGCUUUAUUGGGAGG | T * fG * fUfC * fCmA * fGmC * mUmU * | XXOXOXOXOXOXOXXXXXX | 1454 |
| 8980 | CTU | mUmA * mUfU * mG * mG * mG * mA * mG * | XXX | |
| | | mG * mC * T * mU | | |
| WV- | TGUCCAGCUUUAUUGGGAGG | T * fG * fUfC * fCmA * mGfC * mUmU * | XXOXOXOXOXOXOXXXXXX | 1455 |
| 8981 | CTU | mUmA * mUfU * mG * mG * mG * mA * mG * | XXX | |
| | | mG * mC * T * mU | | |
| WV- | TGUCCAGCUUUAUUGGGAGG | T * fG * fUfC * mCfA * fGmC * mUmU * | XXOXOXOXOXOXOXXXXXX | 1456 |
| 8982 | CTU | mUmA * mUfU * mG * mG * mG * mA * mG * | XXX | |
| | | mG * mC * T * mU | | |
| WV- | TGUCCAGCUUUAUUGGGAGG | T * fG * fUfC * mCfA * mGfC * mUmU * | XXOXOXOXOXOXOXXXXXX | 1457 |
| 8983 | CTU | mUmA * mUfU * mG * mG * mG * mA * mG * | XXX | |
| | | mG * mC * T * mU | | |
| WV- | TGUCCAGCUUUAUUGGGAGG | T * fG * fUfC * mCmA * fGfC * mUmU * | XXOXOXOXOXOXOXXXXXX | 1458 |
| 8984 | CTU | mUmA * mUfU * mG * mG * mG * mA * mG * | XXX | |
| | | mG * mC * T * mU | | |
| WV- | TGUCCAGCUUUAUUGGGAGG | T * fG * fUmC * fCfA * fGmC * mUmU * | XXOXOXOXOXOXOXXXXXX | 1459 |
| 8985 | CTU | mUmA * mUfU * mG * mG * mG * mA * mG * | XXX | |
| | | mG * mC * T * mU | | |
| WV- | TGUCCAGCUUUAUUGGGAGG | T * fG * fUmC * fCfA * mGfC * mUmU * | XXOXOXOXOXOXOXXXXXX | 1460 |
| 8986 | CTU | mUmA * mUfU * mG * mG * mG * mA * mG * | XXX | |
| | | mG * mC * T * mU | | |
| WV- | TGUCCAGCUUUAUUGGGAGG | T * fG * fUmC * fCmA * fGfC * mUmU * | XXOXOXOXOXOXOXXXXXX | 1461 |
| 8987 | CTU | mUmA * mUfU * mG * mG * mG * mA * mG * | XXX | |
| | | mG * mC * T * mU | | |
| WV- | TGUCCAGCUUUAUUGGGAGG | T * fG * fUmC * mCfA * fGfC * mUmU * | XXOXOXOXOXOXOXXXXXX | 1462 |
| 8988 | CTU | mUmA * mUfU * mG * mG * mG * mA * mG * | XXX | |
| | | mG * mC * T * mU | | |
| WV- | TGUCCAGCUUUAUUGGGAGG | T * fG * mUfC * fCfA * fGmC * mUmU * | XXOXOXOXOXOXOXXXXXX | 1463 |
| 8989 | CTU | mUmA * mUfU * mG * mG * mG * mA * mG * | XXX | |
| | | mG * mC * T * mU | | |
| WV- | TGUCCAGCUUUAUUGGGAGG | T * fG * mUfC * fCfA * mGfC * mUmU * | XXOXOXOXOXOXOXXXXXX | 1464 |
| 8990 | CTU | mUmA * mUfU * mG * mG * mG * mA * mG * | XXX | |
| | | mG * mC * T * mU | | |
| WV- | TGUCCAGCUUUAUUGGGAGG | T * fG * mUfC * fCmA * fGfC * mUmU * | XXOXOXOXOXOXOXXXXXX | 1465 |
| 8991 | CTU | mUmA * mUfU * mG * mG * mG * mA * mG * | XXX | |
| | | mG * mC * T * mU | | |
| WV- | TGUCCAGCUUUAUUGGGAGG | T * fG * mUfC * mCfA * fGfC * mUmU * | XXOXOXOXOXOXOXXXXXX | 1466 |
| 8992 | CTU | mUmA * mUfU * mG * mG * mG * mA * mG * | XXX | |
| | | mG * mC * T * mU | | |
| WV- | TGUCCAGCUUUAUUGGGAGG | T * fG * mUmC * fCfA * fGfC * mUmU * | XXOXOXOXOXOXOXXXXXX | 1467 |
| 8993 | CTU | mUmA * mUfU * mG * mG * mG * mA * mG * | XXX | |
| | | mG * mC * T * mU | | |
| WV- | TGUCCAGCUUUAUUGGGAGG | T * fG * fUfC * fCfA * fGmC * mUmU * mUmA | XXOXOXOXOXOXOXXXXXX | 1468 |
| 8994 | CTU | * mUfU * mG * mG * mG * mA * mG * mG * | XXX | |
| | | mC * T * mU | | |
| WV- | TGUCCAGCUUUAUUGGGAGG | T * fG * fUfC * fCfA * mGfC * mUmU * mUmA | XXOXOXOXOXOXOXXXXXX | 1469 |
| 8995 | CTU | * mUfU * mG * mG * mG * mA * mG * mG * | XXX | |
| | | mC * T * mU | | |
| WV- | TGUCCAGCUUUAUUGGGAGG | T * fG * fUfC * fCmA * fGfC * mUmU * mUmA | XXOXOXOXOXOXOXXXXXX | 1470 |
| 8996 | CTU | * mUfU * mG * mG * mG * mA * mG * mG * | XXX | |
| | | mC * T * mU | | |
| WV- | TGUCCAGCUUUAUUGGGAGG | T * fG * fUfC * mCfA * fGfC * mUmU * mUmA | XXOXOXOXOXOXOXXXXXX | 1471 |
| 8997 | CTU | * mUfU * mG * mG * mG * mA * mG * mG * | XXX | |
| | | mC * T * mU | | |
| WV- | TGUCCAGCUUUAUUGGGAGG | T * fG * fUmC * fCfA * fGfC * mUmU * mUmA | XXOXOXOXOXOXOXXXXXX | 1472 |
| 8998 | CTU | * mUfU * mG * mG * mG * mA * mG * mG * | XXX | |
| | | mC * T * mU | | |
| WV- | TGUCCAGCUUUAUUGGGAGG | T * fG * mUfC * fCfA * fGfC * mUmU * mUmA | XXOXOXOXOXOXOXXXXXX | 1473 |
| 8999 | CTU | * mUfU * mG * mG * mG * mA * mG * mG * | XXX | |
| | | mC * T * mU | | |
| WV- | TGUCCAGCUUUAUUGGGAGG | T * fG * fUfC * fCfA * fGfC * mUmU * mUmA * | XXOXOXOXOXOXOXXXXXX | 1474 |
| 9000 | CTU | mUfU * mG * mG * mG * mA * mG * mG * mC | XXX | |
| | | * T * mU | | |
| WV- | TGUCCAGCUUUAUUGGGAGG | 5MRdT * fG * mUmC * mCmA * mGmC * | XXOXOXOXOXOXOXXXXXX | 1475 |
| 9001 | CTU | mUmU * mUmA * mUfU * mG * mG * mG * | XXX | |
| | | mA * mG * mG * mC * T * mU | | |
| WV- | TAGCUUCUUGUCCAGCUUUA | 5MRdT * fA * mGmC * mUmU * mCmU * | XXOXOXOXOXOXOXXXXXX | 1476 |
| 9002 | UTU | mUmG * mUmC * mCfA * mG * mC * mU * | XXX | |
| | | mU * mU * mA * mU * T * mU | | |
| WV- | TGUCCAGCUUUAUUGGGAGG | 5MRdT * fG * mUmC * mCmA * mGmC * mU * | XXOXOXOXXXOXXXXXXXXX | 1477 |
| 9003 | CTU | mU * mUmA * mU * fU * mG * mG * mG * mA | XX | |
| | | * mG * mG * mC * T * mU | | |
| WV- | TAGCUUCUUGUCCAGCUUUA | 5MRdT * fA * mGmC * mU * mU * mC * mU * | XXOXXXXXXXOXOXXXXXXX | 1478 |
| 9004 | UTU | mU * mG * mUmC * mCfA * mG * mC * mU * | XX | |
| | | mU * mU * mA * mU * T * mU | | |
| WV- | TGUCCAGCUUUAUUGGGAGG | 5MRdT * SfG * SmUmC * SmCmA * SmGmC * | SSOSOSOSOSOSOSSSSSSSS | 1479 |
| 9005 | CTU | SmUmU * SmUmA * SmUfU * SmG * SmG * | S | |
| | | SmG * SmA * SmG * SmG * SmC * ST * SmU | | |
| WV- | TAGCUUCUUGUCCAGCUUUA | 5MRdT * SfA * SmGmC * SmUmU * SmCmU * | SSOSOSOSOSOSOSSSSSSSS | 1480 |
| 9006 | UTU | SmUmG * SmUmC * SmCfA * SmG * SmC * | S | |
| | | SmU * SmU * SmU * SmA * SmU * ST * SmU | | |
| WV- | TGUCCAGCUUUAUUGGGAGG | 5MRdT * SfG * SmUmC * SmCmA * SmGmC * | SSOSOSOSSSOSSSSSSSSSSS | 1481 |
| 9007 | CTU | SmU * SmU * SmUmA * SmU * SfU * SmG * | | |
| | | SmG * SmG * SmA * SmG * SmG * SmC * ST * | | |
| | | SmU | | |
| WV- | TAGCUUCUUGUCCAGCUUUA | 5MRdT * SfA * SmGmC * SmU * SmU * SmC * | SSOSSSSSSSOSOSSSSSSSSS | 1482 |
| 9008 | UTU | SmU * SmU * SmG * SmUmC * SmCfA * SmG * | | |
| | | SmC * SmU * SmU * SmU * SmA * SmU * ST * | | |
| | | SmU | | |
| WV- | TGUCCAGCUUUAUUGGGAGG | PO5MRdT * fG * mUmC * mCmA * mGmC * | XXOXOXOXOXOXOXXXXXX | 1483 |
| 9009 | CTU | mUmU * mUmA * mUfU * mG * mG * mG * | XXX | |
| | | mA * mG * mG * mC * T * mU | | |
| WV- | TAGCUUCUUGUCCAGCUUUA | PO5MRdT * fA * mGmC * mUmU * mCmU * | XXOXOXOXOXOXOXXXXXX | 1484 |
| 9010 | UTU | mUmG * mUmC * mCfA * mG * mC * mU * | XXX | |
| | | mU * mU * mA * mU * T * mU | | |
| WV- | TGUCCAGCUUUAUUGGGAGG | PO5MRdT * fG * mUmC * mCmA * mGmC * | XXOXOXOXXXOXXXXXXXXX | 1485 |
| 9011 | CTU | mU * mU * mUmA * mU * fU * mG * mG * mG | XX | |
| | | * mA * mG * mG * mC * T * mU | | |
| WV- | TAGCUUCUUGUCCAGCUUUA | PO5MRdT * fA * mGmC * mU * mU * mC * | XXOXXXXXXXOXOXXXXXXX | 1486 |
| 9012 | UTU | mU * mU * mG * mUmC * mCfA * mG * mC * | XX | |
| | | mU * mU * mU * mA * mU * T * mU | | |
| WV- | TGUCCAGCUUUAUUGGGAGG | PO5MRdT * SfG * SmUmC * SmCmA * SmGmC | SSOSOSOSOSOSOSSSSSSSS | 1487 |
| 9013 | CTU | * SmUmU * SmUmA * SmUfU * SmG * SmG * | S | |
| | | SmG * SmA * SmG * SmG * SmC * ST * SmU | | |
| WV- | TAGCUUCUUGUCCAGCUUUA | PO5MRdT * SfA * SmGmC * SmUmU * SmCmU | SSOSOSOSOSOSOSSSSSSSS | 1488 |
| 9014 | UTU | * SmUmG * SmUmC * SmCfA * SmG * SmC * | S | |
| | | SmU * SmU * SmU * SmA * SmU * ST * SmU | | |
| WV- | TGUCCAGCUUUAUUGGGAGG | PO5MRdT * SfG * SmUmC * SmCmA * SmGmC | SSOSOSOSSSOSSSSSSSSSSS | 1489 |
| 9015 | CTU | * SmU * SmU * SmUmA * SmU * SfU * SmG * | | |
| | | SmG * SmG * SmA * SmG * SmG * SmC * ST * | | |
| | | SmU | | |
| WV- | TAGCUUCUUGUCCAGCUUUA | PO5MRdT * SfA * SmGmC * SmU * SmU * SmC | SSOSSSSSSSOSOSSSSSSSSS | 1490 |
| 9016 | UTU | * SmU * SmU * SmG * SmUmC * SmCfA * SmG | | |
| | | * SmC * SmU * SmU * SmU * SmA * SmU * ST | | |
| | | * SmU | | |
| WV- | TGUCCAGCUUUAUUGGGAGG | PS5MRdT * fG * mUmC * mCmA * mGmC * | XXOXOXOXOXOXOXXXXXX | 1491 |
| 9017 | CTU | mUmU * mUmA * mUfU * mG * mG * mG * | XXX | |
| | | mA * mG * mG * mC * T * mU | | |
| WV- | TAGCUUCUUGUCCAGCUUUA | PS5MRdT * fA * mGmC * mUmU * mCmU * | XXOXOXOXOXOXOXXXXXX | 1492 |
| 9018 | UTU | mUmG * mUmC * mCfA * mG * mC * mU * | XXX | |
| | | mU * mU * mA * mU * T * mU | | |
| WV- | TGUCCAGCUUUAUUGGGAGG | PS5MRdT * fG * mUmC * mCmA * mGmC * | XXOXOXOXXXOXXXXXXXXX | 1493 |
| 9019 | CTU | mU * mU * mUmA * mU * fU * mG * mG * mG | XX | |
| | | * mA * mG * mG * mC * T * mU | | |
| WV- | TAGCUUCUUGUCCAGCUUUA | PS5MRdT * fA * mGmC * mU * mU * mC * mU | XXOXXXXXXXOXOXXXXXXX | 1494 |
| 9020 | UTU | * mU * mG * mUmC * mCfA * mG * mC * mU | XX | |
| | | * mU * mU * mA * mU * T * mU | | |
| WV- | TGUCCAGCUUUAUUGGGAGG | PS5MRdT * SfG * SmUmC * SmCmA * SmGmC | SSOSOSOSOSOSOSSSSSSSS | 1495 |
| 9021 | CTU | * SmUmU * SmUmA * SmUfU * SmG * SmG * | S | |
| | | SmG * SmA * SmG * SmG * SmC * ST * SmU | | |
| WV- | TAGCUUCUUGUCCAGCUUUA | PS5MRdT * SfA * SmGmC * SmUmU * SmCmU | SSOSOSOSOSOSOSSSSSSSS | 1496 |
| 9022 | UTU | * SmUmG * SmUmC * SmCfA * SmG * SmC * | S | |
| | | SmU * SmU * SmU * SmA * SmU * ST * SmU | | |
| WV- | TGUCCAGCUUUAUUGGGAGG | PS5MRdT * SfG * SmUmC * SmCmA * SmGmC | SSOSOSOSSSOSSSSSSSSSSS | 1497 |
| 9023 | CTU | * SmU * SmU * SmUmA * SmU * SfU * SmG * | | |
| | | SmG * SmG * SmA * SmG * SmG * SmC * ST * | | |
| | | SmU | | |
| WV- | TAGCUUCUUGUCCAGCUUUA | PS5MRdT * SfA * SmGmC * SmU * SmU * SmC | SSOSSSSSSSOSOSSSSSSSSS | 1498 |
| 9024 | UTU | * SmU * SmU * SmG * SmUmC * SmCfA * SmG | | |
| | | * SmC * SmU * SmU * SmU * SmA * SmU * ST | | |
| | | * SmU | | |
| WV- | TAGCUUCUUGUCCAGCUUUA | T * fA * mGfC * mUfU * mCfU * mUmG * | XXOXOXOXOXOXOXXXXXX | 1499 |
| 9025 | UTU | mUmC * mCfA * mG * mC * mU * mU * mU * | XXX | |
| | | mA * mU * T * mU | | |
| WV- | TGUCCAGCUUUAUUGGGAGG | T * fG * mUfC * mCfA * mGfC * mU * mU * | XXOXOXOXXXOXXXXXXXXX | 1500 |
| 9026 | CTU | mUmA * mU * fU * mG * mG * mG * mA * mG | XX | |
| | | * mG * mC * T * mU | | |
| WV- | TAGCUUCUUGUCCAGCUUUA | T * fA * mGfC * mU * fU * mC * fU * mU * mG | XXOXXXXXXXOXOXXXXXXX | 1501 |
| 9027 | UTU | * mUmC * mCfA * mG * mC * mU * mU * mU | XX | |
| | | * mA * mU * T * mU | | |
| WV- | TGUCCAGCUUUAUUGGGAGG | T * SfG * SmUfC * SmCfA * SmGfC * SmUmU * | SSOSOSOSOSOSOSSSSSSSS | 1502 |
| 9028 | CTU | SmUmA * SmUfU * SmG * SmG * SmG * SmA | S | |
| | | * SmG * SmG * SmC * ST * SmU | | |
| WV- | TAGCUUCUUGUCCAGCUUUA | T * SfA * SmGfC * SmUfU * SmCfU * SmUmG * | SSOSOSOSOSOSOSSSSSSSS | 1503 |
| 9029 | UTU | SmUmC * SmCfA * SmG * SmC * SmU * SmU * | S | |
| | | SmU * SmA * SmU * ST * SmU | | |
| WV- | TGUCCAGCUUUAUUGGGAGG | T * SfG * SmUfC * SmCfA * SmGfC * SmU * | SSOSOSOSSSOSSSSSSSSSSS | 1504 |
| 9030 | CTU | SmU * SmUmA * SmU * SfU * SmG * SmG * | | |
| | | SmG * SmA * SmG * SmG * SmC * ST * SmU | | |
| WV- | TAGCUUCUUGUCCAGCUUUA | T * SfA * SmGfC * SmU * SfU * SmC * SfU * | SSOSSSSSSSOSOSSSSSSSSS | 1505 |
| 9031 | UTU | SmU * SmG * SmUmC * SmCfA * SmG * SmC * | | |
| | | SmU * SmU * SmU * SmA * SmU * ST * SmU | | |
| WV- | TGUCCAGCUUUAUUGGGAGG | 5MRdT * fG * mUfC * mCfA * mGfC * mUmU * | XXOXOXOXOXOXOXXXXXX | 1506 |
| 9032 | CTU | mUmA * mUfU * mG * mG * mG * mA * mG * | XXX | |
| | | mG * mC * T * mU | | |
| WV- | TAGCUUCUUGUCCAGCUUUA | 5MRdT * fA * mGfC * mUfU * mCfU * mUmG | XXOXOXOXOXOXOXXXXXX | 1507 |
| 9033 | UTU | * mUmC * mCfA * mG * mC * mU * mU * mU | XXX | |
| | | * mA * mU * T * mU | | |
| WV- | TGUCCAGCUUUAUUGGGAGG | 5MRdT * fG * mUfC * mCfA * mGfC * mU * | XXOXOXOXXXOXXXXXXXXX | 1508 |
| 9034 | CTU | mU * mUmA * mU * fU * mG * mG * mG * mA | XX | |
| | | * mG * mG * mC * T * mU | | |
| WV- | TAGCUUCUUGUCCAGCUUUA | 5MRdT * fA * mGfC * mU * fU * mC * fU * mU | XXOXXXXXXXOXOXXXXXXX | 1509 |
| 9035 | UTU | * mG * mUmC * mCfA * mG * mC * mU * mU | XX | |
| | | * mU * mA * mU * T * mU | | |
| WV- | TGUCCAGCUUUAUUGGGAGG | 5MRdT * SfG * SmUfC * SmCfA * SmGfC * | SSOSOSOSOSOSOSSSSSSSS | 1510 |
| 9036 | CTU | SmUmU * SmUmA * SmUfU * SmG * SmG * | S | |
| | | SmG * SmA * SmG * SmG * SmC * ST * SmU | | |
| WV- | TAGCUUCUUGUCCAGCUUUA | 5MRdT * SfA * SmGfC * SmUfU * SmCfU * | SSOSOSOSOSOSOSSSSSSSS | 1511 |
| 9037 | UTU | SmUmG * SmUmC * SmCfA * SmG * SmC * | S | |
| | | SmU * SmU * SmU * SmA * SmU * ST * SmU | | |
| WV- | TGUCCAGCUUUAUUGGGAGG | 5MRdT * SfG * SmUfC * SmCfA * SmGfC * | SSOSOSOSSSOSSSSSSSSSSS | 1512 |
| 9038 | CTU | SmU * SmU * SmUmA * SmU * SfU * SmG * | | |
| | | SmG * SmG * SmA * SmG * SmG * SmC * ST * | | |
| | | SmU | | |
| WV- | TAGCUUCUUGUCCAGCUUUA | 5MRdT * SfA * SmGfC * SmU * SfU * SmC * | SSOSSSSSSSOSOSSSSSSSSS | 1513 |
| 9039 | UTU | SfU * SmU * SmG * SmUmC * SmCfA * SmG * | | |
| | | SmC * SmU * SmU * SmU * SmA * SmU * ST * | | |
| | | SmU | | |
| WV- | TGUCCAGCUUUAUUGGGAGG | PO5MRdT * fG * mUfC * mCfA * mGfC * | XXOXOXOXOXOXOXXXXXX | 1514 |
| 9040 | CTU | mUmU * mUmA * mUfU * mG * mG * mG * | XXX | |
| | | mA * mG * mG * mC * T * mU | | |
| WV- | TAGCUUCUUGUCCAGCUUUA | PO5MRdT * fA * mGfC * mUfU * mCfU * | XXOXOXOXOXOXOXXXXXX | 1515 |
| 9041 | UTU | mUmG * mUmC * mCfA * mG * mC * mU * | XXX | |
| | | mU * mU * mA * mU * T * mU | | |
| WV- | TGUCCAGCUUUAUUGGGAGG | PO5MRdT * fG * mUfC * mCfA * mGfC * mU * | XXOXOXOXXXOXXXXXXXXX | 1516 |
| 9042 | CTU | mU * mUmA * mU * fU * mG * mG * mG * mA | XX | |
| | | * mG * mG * mC * T * mU | | |
| WV- | TAGCUUCUUGUCCAGCUUUA | PO5MRdT * fA * mGfC * mU * fU * mC * fU * | XXOXXXXXXXOXOXXXXXXX | 1517 |
| 9043 | UTU | mU * mG * mUmC * mCfA * mG * mC * mU * | XX | |
| | | mU * mU * mA * mU * T * mU | | |
| WV- | TGUCCAGCUUUAUUGGGAGG | PO5MRdT * SfG * SmUfC * SmCfA * SmGfC * | SSOSOSOSOSOSOSSSSSSSS | 1518 |
| 9044 | CTU | SmUmU * SmUmA * SmUfU * SmG * SmG * | S | |
| | | SmG * SmA * SmG * SmG * SmC * ST * SmU | | |
| WV- | TAGCUUCUUGUCCAGCUUUA | PO5MRdT * SfA * SmGfC * SmUfU * SmCfU * | SSOSOSOSOSOSOSSSSSSSS | 1519 |
| 9045 | UTU | SmUmG * SmUmC * SmCfA * SmG * SmC * | S | |
| | | SmU * SmU * SmU * SmA * SmU * ST * SmU | | |
| WV- | TGUCCAGCUUUAUUGGGAGG | PO5MRdT * SfG * SmUfC * SmCfA * SmGfC * | SSOSOSOSSSOSSSSSSSSSSS | 1520 |
| 9046 | CTU | SmU * SmU * SmUmA * SmU * SfU * SmG * | | |
| | | SmG * SmG * SmA * SmG * SmG * SmC * ST * | | |
| | | SmU | | |
| WV- | TAGCUUCUUGUCCAGCUUUA | PO5MRdT * SfA * SmGfC * SmU * SfU * SmC * | SSOSSSSSSSOSOSSSSSSSSS | 1521 |
| 9047 | UTU | SfU * SmU * SmG * SmUmC * SmCfA * SmG * | | |
| | | SmC * SmU * SmU * SmU * SmA * SmU * ST * | | |
| | | SmU | | |
| WV- | TGUCCAGCUUUAUUGGGAGG | PS5MRdT * fG * mUfC * mCfA * mGfC * | XXOXOXOXOXOXOXXXXXX | 1522 |
| 9048 | CTU | mUmU * mUmA * mUfU * mG * mG * mG * | XXX | |
| | | mA * mG * mG * mC * T * mU | | |
| WV- | TAGCUUCUUGUCCAGCUUUA | PS5MRdT * fA * mGfC * mUfU * mCfU * | XXOXOXOXOXOXOXXXXXX | 1523 |
| 9049 | UTU | mUmG * mUmC * mCfA * mG * mC * mU * | XXX | |
| | | mU * mU * mA * mU * T * mU | | |
| WV- | TGUCCAGCUUUAUUGGGAGG | PS5MRdT * fG * mUfC * mCfA * mGfC * mU * | XXOXOXOXXXOXXXXXXXXX | 1524 |
| 9050 | CTU | mU * mUmA * mU * fU * mG * mG * mG * mA | XX | |
| | | * mG * mG * mC * T * mU | | |
| WV- | TAGCUUCUUGUCCAGCUUUA | PS5MRdT * fA * mGfC * mU * fU * mC * fU * | XXOXXXXXXXOXOXXXXXXX | 1525 |
| 9051 | UTU | mU * mG * mUmC * mCfA * mG * mC * mU * | XX | |
| | | mU * mU * mA * mU * T * mU | | |
| WV- | TGUCCAGCUUUAUUGGGAGG | PS5MRdT * SfG * SmUfC * SmCfA * SmGfC * | SSOSOSOSOSOSOSSSSSSSS | 1526 |
| 9052 | CTU | SmUmU * SmUmA * SmUfU * SmG * SmG * | S | |
| | | SmG * SmA * SmG * SmG * SmC * ST * SmU | | |
| WV- | TAGCUUCUUGUCCAGCUUUA | PS5MRdT * SfA * SmGfC * SmUfU * SmCfU * | SSOSOSOSOSOSOSSSSSSSS | 1527 |
| 9053 | UTU | SmUmG * SmUmC * SmCfA * SmG * SmC * | S | |
| | | SmU * SmU * SmU * SmA * SmU * ST * SmU | | |
| WV- | TGUCCAGCUUUAUUGGGAGG | PS5MRdT * SfG * SmUfC * SmCfA * SmGfC * | SSOSOSOSSSOSSSSSSSSSSS | 1528 |
| 9054 | CTU | SmU * SmU * SmUmA * SmU * SfU * SmG * | | |
| | | SmG * SmG * SmA * SmG * SmG * SmC * ST * | | |
| | | SmU | | |
| WV- | TAGCUUCUUGUCCAGCUUUA | PS5MRdT * SfA * SmGfC * SmU * SfU * SmC * | SSOSSSSSSSOSOSSSSSSSSS | 1529 |
| 9055 | UTU | SfU * SmU * SmG * SmUmC * SmCfA * SmG * | | |
| | | SmC * SmU * SmU * SmU * SmA * SmU * ST * | | |
| | | SmU | | |
| WV- | TGUCCAGCUUUAUUGGGAGG | L001T * SfG * SmUfC * SmCfA * SmGfC * SmU | OSSOSOSOSSSOSSSSSSSSS | 1530 |
| 9211 | CTU | * SfU * SmUfA * SmU * SfU * SmG * SfG * | SS | |
| | | SmG * SfA * SmG * SfG * SmC * ST * SmU | | |
| WV- | TGUCCAGCUUUAUUGGGAGG | L0015MRdT * SfG * SmUfC * SmCfA * SmGfC * | OSSOSOSOSSSOSSSSSSSSS | 1531 |
| 9212 | CTU | SmU * SfU * SmUfA * SmU * SfU * SmG * SfG SS | | |
| | | * SmG * SfA * SmG * SfG * SmC * ST * SmU | | |
| WV- | TGUCCAGCUUUAUUGGGAGG | POT * SfG * SmUfC * SmCfA * SmGfC * SmU * | SSOSOSOSSSOSSSSSSSSSSS | 1532 |
| 9213 | CTU | SfU * SmUfA * SmU * SfU * SmG * SfG * SmG | | |
| | | * SfA * SmG * SfG * SmC * SAMC6T * SmU | | |
| WV- | TGUCCAGCUUUAUUGGGAGG | T * SfG * SmUmC * SmCmA * SmGmC * SmU * | SSOSOSOSSSOSSSSSSSSSSS | 1533 |
| 9214 | CTU | SmU * SmUmA * SmU * SfU * SmG * SmG * | | |
| | | SmG * SmA * SmG * SmG * SmC * STGaNC6T * | | |
| | | SmU | | |
| WV- | TGUCCAGCUUUAUUGGGAGG | 5MRdT * SfG * SmUmC * SmCmA * SmGmC * | SSOSOSOSSSOSSSSSSSSSSS | 1534 |
| 9215 | CTU | SmU * SmU * SmUmA * SmU * SfU * SmG * | | |
| | | SmG * SmG * SmA * SmG * SmG * SmC * | | |
| | | STGaNC6T * SmU | | |
| WV- | TGUCCAGCUUUAUUGGGAGG | PO5MRdT * SfG * SmUmC * SmCmA * SmGmC | SSOSOSOSSSOSSSSSSSSSSS | 1535 |
| 9216 | CTU | * SmU * SmU * SmUmA * SmU * SfU * SmG * | | |
| | | SmG * SmG * SmA * SmG * SmG * SmC * | | |
| | | STGaNC6T * SmU | | |
| WV- | TGUCCAGCUUUAUUGGGAGG | PS5MRdT * SfG * SmUmC * SmCmA * SmGmC | SSOSOSOSSSOSSSSSSSSSSS | 1536 |
| 9217 | CTU | * SmU * SmU * SmUmA * SmU * SfU * SmG * | | |
| | | SmG * SmG * SmA * SmG * SmG * SmC * | | |
| | | STGaNC6T * SmU | | |
| WV- | TGUCCAGCUUUAUUGGGAGG | T * SfG * SmUfC * SmCfA * SmGfC * SmU * | SSOSOSOSSSOSSSSSSSSSSS | 1537 |
| 9218 | CTU | SmU * SmUmA * SmU * SfU * SmG * SmG * | | |
| | | SmG * SmA * SmG * SmG * SmC * STGaNC6T * | | |
| | | SmU | | |
| WV- | TGUCCAGCUUUAUUGGGAGG | 5MRdT * SfG * SmUfC * SmCfA * SmGfC * | SSOSOSOSSSOSSSSSSSSSSS | 1538 |
| 9219 | CTU | SmU * SmU * SmUmA * SmU * SfU * SmG * | | |
| | | SmG * SmG * SmA * SmG * SmG * SmC * | | |
| | | STGaNC6T * SmU | | |
| WV- | TGUCCAGCUUUAUUGGGAGG | PO5MRdT * SfG * SmUfC * SmCfA * SmGfC * | SSOSOSOSSSOSSSSSSSSSSS | 1539 |
| 9220 | CTU | SmU * SmU * SmUmA * SmU * SfU * SmG * | | |
| | | SmG * SmG * SmA * SmG * SmG * SmC * | | |
| | | STGaNC6T * SmU | | |
| WV- | TGUCCAGCUUUAUUGGGAGG | PS5MRdT * SfG * SmUfC * SmCfA * SmGfC * | SSOSOSOSSSOSSSSSSSSSSS | 1540 |
| 9221 | CTU | SmU * SmU * SmUmA * SmU * SfU * SmG * | | |
| | | SmG * SmG * SmA * SmG * SmG * SmC * | | |
| | | STGaNC6T * SmU | | |
| WV- | TGUCCAGCUUUAUUGGGAGG | T * SfG * SmUmC * SmCmA * SmGmC * SmU * | SSOSOSOSSSOSSSSSSSSSSS | 1541 |
| 9229 | CTU | SmU * SmUmA * SmU * SfU * SmG * SmG * | | |
| | | SmG * SmA * SmG * SmG * SmC * SAMC6T * | | |
| | | SmU | | |
| WV- | TGUCCAGCUUUAUUGGGAGG | 5MRdT * SfG * SmUmC * SmCmA * SmGmC * | SSOSOSOSSSOSSSSSSSSSSS | 1542 |
| 9230 | CTU | SmU * SmU * SmUmA * SmU * SfU * SmG * | | |
| | | SmG * SmG * SmA * SmG * SmG * SmC * | | |
| | | SAMC6T * SmU | | |
| WV- | TGUCCAGCUUUAUUGGGAGG | PO5MRdT * SfG * SmUmC * SmCmA * SmGmC | SSOSOSOSSSOSSSSSSSSSSS | 1543 |
| 9231 | CTU | * SmU * SmU * SmUmA * SmU * SfU * SmG * | | |
| | | SmG * SmG * SmA * SmG * SmG * SmC * | | |
| | | SAMC6T * SmU | | |
| WV- | TGUCCAGCUUUAUUGGGAGG | PS5MRdT * SfG * SmUmC * SmCmA * SmGmC | SSOSOSOSSSOSSSSSSSSSSS | 1544 |
| 9232 | CTU | * SmU * SmU * SmUmA * SmU * SfU * SmG * | | |
| | | SmG * SmG * SmA * SmG * SmG * SmC * | | |
| | | SAMC6T * SmU | | |
| WV- | TGUCCAGCUUUAUUGGGAGG | T * SfG * SmUfC * SmCfA * SmGfC * SmU * | SSOSOSOSSSOSSSSSSSSSSS | 1545 |
| 9233 | CTU | SmU * SmUmA * SmU * SfU * SmG * SmG * | | |
| | | SmG * SmA * SmG * SmG * SmC * SAMC6T * | | |
| | | SmU | | |
| WV- | TGUCCAGCUUUAUUGGGAGG | 5MRdT * SfG * SmUfC * SmCfA * SmGfC * | SSOSOSOSSSOSSSSSSSSSSS | 1546 |
| 9234 | CTU | SmU * SmU * SmUmA * SmU * SfU * SmG * | | |
| | | SmG * SmG * SmA * SmG * SmG * SmC * | | |
| | | SAMC6T * SmU | | |
| WV- | TGUCCAGCUUUAUUGGGAGG | PO5MRdT * SfG * SmUfC * SmCfA * SmGfC * | SSOSOSOSSSOSSSSSSSSSSS | 1547 |
| 9235 | CTU | SmU * SmU * SmUmA * SmU * SfU * SmG * | | |
| | | SmG * SmG * SmA * SmG * SmG * SmC * | | |
| | | SAMC6T * SmU | | |
| WV- | TGUCCAGCUUUAUUGGGAGG | PS5MRdT * SfG * SmUfC * SmCfA * SmGfC * | SSOSOSOSSSOSSSSSSSSSSS | 1548 |
| 9236 | CTU | SmU * SmU * SmUmA * SmU * SfU * SmG * | | |
| | | SmG * SmG * SmA * SmG * SmG * SmC * | | |
| | | SAMC6T * SmU | | |
| WV- | TGUCCAGCUUUAUUGGGAGG | PO5MRdT * SfG * SmUfC * SmCfA * SmGfC * | SSOSOSOSXSOSSSSSSSSSSS | 1549 |
| 9237 | CTU | Spac3mU * fU * SmUfA * SmU * SfU * SmG * | | |
| | | SfG * SmG * SfA * SmG * SfG * SmC * SAMC6T | | |
| | | * SmU | | |
| WV- | TGUCCAGCUUUAUUGGGAGG | PO5MRdT * SfG * SmUfC * SmCfA * SmGfC * | SSOSOSOSSSOSSSSSSSSSSS | 1550 |
| 9238 | CTU | SmU * SfU * SmUfA * SmU * SfU * SmG * SfG | | |
| | | * SmG * SfA * SmG * SfG * SmC * SAMC6T * | | |
| | | Spac3mU | | |
| WV- | GUCCAGCUUUAUUGGGAGGC | L009 * fG * mUfC * mCfA * mGfC * mUfU * | XXOXOXOXOXOXOXXXXXX | 1551 |
| 9239 | TU | mUfA * mUfU * mG * fG * mG * fA * mG * fG | XXX | |
| | | * mC * T * mU | | |
| WV- | TUCCAGCUUUAUUGGGAGGC | T * L009 * mUfC * mCfA * mGfC * mUfU * | XXOXOXOXOXOXOXXXXXX | 1552 |
| 9240 | TU | mUfA * mUfU * mG * fG * mG * fA * mG * fG | XXX | |
| | | * mC * T * mU | | |
| WV- | TGCCAGCUUUAUUGGGAGGC | T * fG * L009fC * mCfA * mGfC * mUfU * | XXOXOXOXOXOXOXXXXXX | 1553 |
| 9241 | TU | mUfA * mUfU * mG * fG * mG * fA * mG * fG | XXX | |
| | | * mC * T * mU | | |
| WV- | TGUCAGCUUUAUUGGGAGGC | T * fG * mUL009 * mCfA * mGfC * mUfU * | XXOXOXOXOXOXOXXXXXX | 1554 |
| 9242 | TU | mUfA * mUfU * mG * fG * mG * fA * mG * fG | XXX | |
| | | * mC * T * mU | | |
| WV- | TGUCAGCUUUAUUGGGAGGC | T * fG * mUfC * L009fA * mGfC * mUfU * | XXOXOXOXOXOXOXXXXXX | 1555 |
| 9243 | TU | mUfA * mUfU * mG * fG * mG * fA * mG * fG | XXX | |
| | | * mC * T * mU | | |
| WV- | TGUCCGCUUUAUUGGGAGGC | T * fG * mUfC * mCL009 * mGfC * mUfU * | XXOXOXOXOXOXOXXXXXX | 1556 |
| 9244 | TU | mUfA * mUfU * mG * fG * mG * fA * mG * fG | XXX | |
| | | * mC * T * mU | | |
| WV- | TGUCCACUUUAUUGGGAGGC | T * fG * mUfC * mCfA * L009fC * mUfU * | XXOXOXOXOXOXOXXXXXX | 1557 |
| 9245 | TU | mUfA * mUfU * mG * fG * mG * fA * mG * fG | XXX | |
| | | * mC * T * mU | | |
| WV- | TGUCCAGUUUAUUGGGAGGC | T * fG * mUfC * mCfA * mGL009 * mUfU * | XXOXOXOXOXOXOXXXXXX | 1558 |
| 9246 | TU | mUfA * mUfU * mG * fG * mG * fA * mG * fG | XXX | |
| | | * mC * T * mU | | |
| WV- | TGUCCAGCUUAUUGGGAGGC | T * fG * mUfC * mCfA * mGfC * L009fU * | XXOXOXOXOXOXOXXXXXX | 1559 |
| 9247 | TU | mUfA * mUfU * mG * fG * mG * fA * mG * fG | XXX | |
| | | * mC * T * mU | | |
| WV- | TGUCCAGCUUAUUGGGAGGC | T * fG * mUfC * mCfA * mGfC * mUL009 * | XXOXOXOXOXOXOXXXXXX | 1560 |
| 9248 | TU | mUfA * mUfU * mG * fG * mG * fA * mG * fG | XXX | |
| | | * mC * T * mU | | |
| WV- | TGUCCAGCUUAUUGGGAGGC | T * fG * mUfC * mCfA * mGfC * mUfU * | XXOXOXOXOXOXOXXXXXX | 1561 |
| 9249 | TU | L009fA * mUfU * mG * fG * mG * fA * mG * fG | XXX | |
| | | * mC * T * mU | | |
| WV- | GUCCAGCUUUAUUGGGAGGC | L010 * fG * mUfC * mCfA * mGfC * mUfU * | XXOXOXOXOXOXOXXXXXX | 1562 |
| 9250 | TU | mUfA * mUfU * mG * fG * mG * fA * mG * fG | XXX | |
| | | * mC * T * mU | | |
| WV- | TUCCAGCUUUAUUGGGAGGC | T * L010 * mUfC * mCfA * mGfC * mUfU * | XXOXOXOXOXOXOXXXXXX | 1563 |
| 9251 | TU | mUfA * mUfU * mG * fG * mG * fA * mG * fG | XXX | |
| | | * mC * T * mU | | |
| WV- | TGCCAGCUUUAUUGGGAGGC | T * fG * L010fC * mCfA * mGfC * mUfU * | XXOXOXOXOXOXOXXXXXX | 1564 |
| 9252 | TU | mUfA * mUfU * mG * fG * mG * fA * mG * fG | XXX | |
| | | * mC * T * mU | | |
| WV- | TGUCAGCUUUAUUGGGAGGC | T * fG * mUL010 * mCfA * mGfC * mUfU * | XXOXOXOXOXOXOXXXXXX | 1565 |
| 9253 | TU | mUfA * mUfU * mG * fG * mG * fA * mG * fG | XXX | |
| | | * mC * T * mU | | |
| WV- | TGUCAGCUUUAUUGGGAGGC | T * fG * mUfC * L010fA * mGfC * mUfU * | XXOXOXOXOXOXOXXXXXX | 1566 |
| 9254 | TU | mUfA * mUfU * mG * fG * mG * fA * mG * fG | XXX | |
| | | * mC * T * mU | | |
| WV- | TGUCCGCUUUAUUGGGAGGC | T * fG * mUfC * mCL010 * mGfC * mUfU * | XXOXOXOXOXOXOXXXXXX | 1567 |
| 9255 | TU | mUfA * mUfU * mG * fG * mG * fA * mG * fG | XXX | |
| | | * mC * T * mU | | |
| WV- | TGUCCACUUUAUUGGGAGGC | T * fG * mUfC * mCfA * L010fC * mUfU * | XXOXOXOXOXOXOXXXXXX | 1568 |
| 9256 | TU | mUfA * mUfU * mG * fG * mG * fA * mG * fG | XXX | |
| | | * mC * T * mU | | |
| WV- | TGUCCAGUUUAUUGGGAGGC | T * fG * mUfC * mCfA * mGL010 * mUfU * | XXOXOXOXOXOXOXXXXXX | 1569 |
| 9257 | TU | mUfA * mUfU * mG * fG * mG * fA * mG * fG | XXX | |
| | | * mC * T * mU | | |
| WV- | TGUCCAGCUUAUUGGGAGGC | T * fG * mUfC * mCfA * mGfC * L010fU * | XXOXOXOXOXOXOXXXXXX | 1570 |
| 9258 | TU | mUfA * mUfU * mG * fG * mG * fA * mG * fG | XXX | |
| | | * mC * T * mU | | |
| WV- | TGUCCAGCUUAUUGGGAGGC | T * fG * mUfC * mCfA * mGfC * mUL010 * | XXOXOXOXOXOXOXXXXXX | 1571 |
| 9259 | TU | mUfA * mUfU * mG * fG * mG * fA * mG * fG | XXX | |
| | | * mC * T * mU | | |
| WV- | TGUCCAGCUUAUUGGGAGGC | T * fG * mUfC * mCfA * mGfC * mUfU * | XXOXOXOXOXOXOXXXXXX | 1572 |
| 9260 | TU | L010fA * mUfU * mG * fG * mG * fA * mG * fG | XXX | |
| | | * mC * T * mU | | |
| WV- | GCCACUGUAGAAAGGCAUGA | L009 * fG * mCfC * mAfC * mUfG * mUfA * | XXOXOXOXOXOXOXOOOO | 1573 |
| 9261 | TU | mGfA * mAfA * mGfGmCfAmUfGmA * T * mU | OOXX | |
| WV- | TCCACUGUAGAAAGGCAUGAT | T * L009 * mCfC * mAfC * mUfG * mUfA * | XXOXOXOXOXOXOXOOOO | 1574 |
| 9262 | U | mGfA * mAfA * mGfGmCfAmUfGmA * T * mU | OOXX | |
| WV- | TGCACUGUAGAAAGGCAUGAT | T * fG * L009fC * mAfC * mUfG * mUfA * | XXOXOXOXOXOXOXOOOO | 1575 |
| 9263 | U | mGfA * mAfA * mGfGmCfAmUfGmA * T * mU | OOXX | |
| WV- | TGCACUGUAGAAAGGCAUGAT | T * fG * mCL009 * mAfC * mUfG * mUfA * | XXOXOXOXOXOXOXOOOO | 1576 |
| 9264 | U | mGfA * mAfA * mGfGmCfAmUfGmA * T * mU | OOXX | |
| WV- | TGCCCUGUAGAAAGGCAUGAT | T * fG * mCfC * L009fC * mUfG * mUfA * | XXOXOXOXOXOXOXOOOO | 1577 |
| 9265 | U | mGfA * mAfA * mGfGmCfAmUfGmA * T * mU | OOXX | |
| WV- | TGCCAUGUAGAAAGGCAUGAT | T * fG * mCfC * mAL009 * mUfG * mUfA * | XXOXOXOXOXOXOXOOOO | 1578 |
| 9266 | U | mGfA * mAfA * mGfGmCfAmUfGmA * T * mU | OOXX | |
| WV- | TGCCACGUAGAAAGGCAUGAT | T * fG * mCfC * mAfC * LOO9fG * mUfA * mGfA | XXOXOXOXOXOXOXOOOO | 1579 |
| 9267 | U | * mAfA * mGfGmCfAmUfGmA * T * mU | OOXX | |
| WV- | TGCCACUUAGAAAGGCAUGAT | T * fG * mCfC * mAfC * mU L009 * mUfA * | XXOXOXOXOXOXOXOOOO | 1580 |
| 9268 | U | mGfA * mAfA * mGfGmCfAmUfGmA * T * mU | OOXX | |
| WV- | TGCCACUGAGAAAGGCAUGAT | T * fG * mCfC * mAfC * mUfG * L009fA * mGfA | XXOXOXOXOXOXOXOOOO | 1581 |
| 9269 | U | * mAfA * mGfGmCfAmUfGmA * T * mU | OOXX | |
| WV- | TGCCACUGUGAAAGGCAUGAT | T * fG * mCfC * mAfC * mUfG * mUL009 * | XXOXOXOXOXOXOXOOOO | 1582 |
| 9270 | U | mGfA * mAfA * mGfGmCfAmUfGmA * T * mU | OOXX | |
| WV- | TGCCACUGUAAAAGGCAUGAT | T * fG * mCfC * mAfC * mUfG * mUfA * L009fA | XXOXOXOXOXOXOXOOOO | 1583 |
| 9271 | U | * mAfA * mGfGmCfAmUfGmA * T * mU | OOXX | |
| WV- | TGCCACUGUAGAAGGCAUGAT | T * fG * mCfC * mAfC * mUfG * mUfA * mGfA | XXOXOXOXOXOXOXOOOO | 1584 |
| 9272 | U | * mAL009 * mGfGmCfAmUfGmA * T * mU | OOXX | |
| WV- | GCCACUGUAGAAAGGCAUGA | L010 * fG * mCfC * mAfC * mUfG * mUfA * | XXOXOXOXOXOXOXOOOO | 1585 |
| 9273 | TU | mGfA * mAfA * mGfGmCfAmUfGmA * T * mU | OOXX | |
| WV- | TCCACUGUAGAAAGGCAUGAT | T * L010 * mCfC * mAfC * mUfG * mUfA * | XXOXOXOXOXOXOXOOOO | 1586 |
| 9274 | U | mGfA * mAfA * mGfGmCfAmUfGmA * T * mU | OOXX | |
| WV- | TGCACUGUAGAAAGGCAUGAT | T * fG * L010fC * mAfC * mUfG * mUfA * | XXOXOXOXOXOXOXOOOO | 1587 |
| 9275 | U | mGfA * mAfA * mGfGmCfAmUfGmA * T * mU | OOXX | |
| WV- | TGCACUGUAGAAAGGCAUGAT | T * fG * mCL010 * mAfC * mUfG * mUfA * | XXOXOXOXOXOXOXOOOO | 1588 |
| 9276 | U | mGfA * mAfA * mGfGmCfAmUfGmA * T * mU | OOXX | |
| WV- | TGCCCUGUAGAAAGGCAUGAT | T * fG * mCfC * L010fC * mUfG * mUfA * | XXOXOXOXOXOXOXOOOO | 1589 |
| 9277 | U | mGfA * mAfA * mGfGmCfAmUfGmA * T * mU | OOXX | |
| WV- | TGCCAUGUAGAAAGGCAUGAT | T * fG * mCfC * mAL010 * mUfG * mUfA * | XXOXOXOXOXOXOXOOOO | 1590 |
| 9278 | U | mGfA * mAfA * mGfGmCfAmUfGmA * T * mU | OOXX | |
| WV- | TGCCACGUAGAAAGGCAUGAT | T * fG * mCfC * mAfC * L010fG * mUfA * mGfA | XXOXOXOXOXOXOXOOOO | 1591 |
| 9279 | U | * mAfA * mGfGmCfAmUfGmA * T * mU | OOXX | |
| WV- | TGCCACUUAGAAAGGCAUGAT | T * fG * mCfC * mAfC * mU L010 * mUfA * | XXOXOXOXOXOXOXOOOO | 1592 |
| 9280 | U | mGfA * mAfA * mGfGmCfAmUfGmA * T * mU | OOXX | |
| WV- | TGCCACUGAGAAAGGCAUGAT | T * fG * mCfC * mAfC * mUfG * L010fA * mGfA | XXOXOXOXOXOXOXOOOO | 1593 |
| 9281 | U | * mAfA * mGfGmCfAmUfGmA * T * mU | OOXX | |
| WV- | TGCCACUGUGAAAGGCAUGAT | T * fG * mCfC * mAfC * mUfG * mUL010 * | XXOXOXOXOXOXOXOOOO | 1594 |
| 9282 | U | mGfA * mAfA * mGfGmCfAmUfGmA * T * mU | OOXX | |
| WV- | TGCCACUGUAAAAGGCAUGAT | T * fG * mCfC * mAfC * mUfG * mUfA * L010fA | XXOXOXOXOXOXOXOOOO | 1595 |
| 9283 | U | * mAfA * mGfGmCfAmUfGmA * T * mU | OOXX | |
| WV- | TGCCACUGUAGAAGGCAUGAT | T * fG * mCfC * mAfC * mUfG * mUfA * mGfA | XXOXOXOXOXOXOXOOOO | 1596 |
| 9284 | U | * mAL010 * mGfGmCfAmUfGmA * T * mU | OOXX | |
| WV- | TGUCCAGCUUUAUUGGGAGG | Mod001L0015MRdT * SfG * SmUmC * SmCmA | OSSOSOSOSSSOSSSSSSSSS | 1597 |
| 9392 | CTU | * SmGmC * SmU * SmU * SmUmA * SmU * | SS | |
| | | SfU * SmG * SmG * SmG * SmA * SmG * SmG | | |
| | | * SmC * ST * SmU | | |
| WV- | TGUCCAGCUUUAUUGGGAGG | L0015MRdT * SfG * SmUmC * SmCmA * | OSSOSOSOSSSOSSSSSSSSS | 1598 |
| 9393 | CTU | SmGmC * SmU * SmU * SmUmA * SmU * SfU | SS | |
| | | * SmG * SmG * SmG * SmA * SmG * SmG * | | |
| | | SmC * ST * SmU | | |
| WV- | TAGCUUCUUGUCCAGCUUUA | POT * SfA * SmGfC * SmU * SfU * SmC * SfU * | SSOSSSSSSSOSOSSSSSSSSS | 1599 |
| 9446 | UTU | SmU * SfG * SmUfC * SmCfA * SmG * SfC * | | |
| | | SmU * SfU * SmU * SfA * SmU * STGaNC6T * | | |
| | | SmU | | |
| WV- | TAGCUUCUUGUCCAGCUUUA | POT * SfA * SmGmC * SmU * SmU * SmC * | SSOSSSSSSSOSOSSSSSSSSS | 1600 |
| 9447 | UTU | SmU * SmU * SmG * SmUmC * SmCfA * SmG * | | |
| | | SmC * SmU * SmU * SmU * SmA * SmU * | | |
| | | STGaNC6T * SmU | | |
| WV- | TAGCUUCUUGUCCAGCUUUA | PST * SfA * SmGfC * SmU * SfU * SmC * SfU * | SSOSSSSSSSOSOSSSSSSSSS | 1601 |
| 9448 | UTU | SmU * SfG * SmUfC * SmCfA * SmG * SfC * | | |
| | | SmU * SfU * SmU * SfA * SmU * STGaNC6T * | | |
| | | SmU | | |
| WV- | TAGCUUCUUGUCCAGCUUUA | PST * SfA * SmGmC * SmU * SmU * SmC * | SSOSSSSSSSOSOSSSSSSSSS | 1602 |
| 9449 | UTU | SmU * SmU * SmG * SmUmC * SmCfA * SmG * | | |
| | | SmC * SmU * SmU * SmU * SmA * SmU * | | |
| | | STGaNC6T * SmU | | |
| WV- | TAGCUUCUUGUCCAGCUUUA | POT * SfA * SmGfC * SmU * SfU * SmC * SfU * | SSOSSSSSSSOSOSSSSSSSSS | 1603 |
| 9450 | UTU | SmU * SfG * SmUfC * SmCfA * SmG * SfC * | | |
| | | SmU * SfU * SmU * SfA * SmU * SAMC6T * | | |
| | | SmU | | |
| WV- | TAGCUUCUUGUCCAGCUUUA | POT * SfA * SmGmC * SmU * SmU * SmC * | SSOSSSSSSSOSOSSSSSSSSS | 1604 |
| 9451 | UTU | SmU * SmU * SmG * SmUmC * SmCfA * SmG * | | |
| | | SmC * SmU * SmU * SmU * SmA * SmU * | | |
| | | SAMC6T * SmU | | |
| WV- | TAGCUUCUUGUCCAGCUUUA | PST * SfA * SmGfC * SmU * SfU * SmC * SfU * | SSOSSSSSSSOSOSSSSSSSSS | 1605 |
| 9452 | UTU | SmU * SfG * SmUfC * SmCfA * SmG * SfC * | | |
| | | SmU * SfU * SmU * SfA * SmU * SAMC6T * | | |
| | | SmU | | |
| WV- | TAGCUUCUUGUCCAGCUUUA | PST * SfA * SmGmC * SmU * SmU * SmC * | SSOSSSSSSSOSOSSSSSSSSS | 1606 |
| 9453 | UTU | SmU * SmU * SmG * SmUmC * SmCfA * SmG * | | |
| | | SmC * SmU * SmU * SmU * SmA * SmU * | | |
| | | SAMC6T * SmU | | |
| WV- | TAGCUUCUUGUCCAGCUUUA | PO5MRdT * SfA * SmGmC * SmU * SmU * SmC | SSOSSSSSSSOSOSSSSSSSSS | 1607 |
| 9454 | UTU | * SmU * SmU * SmG * SmUmC * SmCfA * SmG | | |
| | | * SmC * SmU * SmU * SmU * SmA * SmU * | | |
| | | STGaNC6T * SmU | | |
| WV- | TAGCUUCUUGUCCAGCUUUA | PS5MRdT * SfA * SmGfC * SmU * SfU * SmC * | SSOSSSSSSSOSOSSSSSSSSS | 1608 |
| 9455 | UTU | SfU * SmU * SfG * SmUfC * SmCfA * SmG * SfC | | |
| | | * SmU * SfU * SmU * SfA * SmU * STGaNC6T * | | |
| | | SmU | | |
| WV- | TAGCUUCUUGUCCAGCUUUA | PS5MRdT * SfA * SmGmC * SmU * SmU * SmC | SSOSSSSSSSOSOSSSSSSSSS | 1609 |
| 9456 | UTU | * SmU * SmU * SmG * SmUmC * SmCfA * SmG | | |
| | | * SmC * SmU * SmU * SmU * SmA * SmU * | | |
| | | STGaNC6T * SmU | | |
| WV- | TAGCUUCUUGUCCAGCUUUA | PO5MRdT * SfA * SmGmC * SmU * SmU * SmC | SSOSSSSSSSOSOSSSSSSSSS | 1610 |
| 9457 | UTU | * SmU * SmU * SmG * SmUmC * SmCfA * SmG | | |
| | | * SmC * SmU * SmU * SmU * SmA * SmU * | | |
| | | SAMC6T * SmU | | |
| WV- | TAGCUUCUUGUCCAGCUUUA | PS5MRdT * SfA * SmGfC * SmU * SfU * SmC * | SSOSSSSSSSOSOSSSSSSSSS | 1611 |
| 9458 | UTU | SfU * SmU * SfG * SmUfC * SmCfA * SmG * SfC | | |
| | | * SmU * SfU * SmU * SfA * SmU * SAMC6T * | | |
| | | SmU | | |
| WV- | TAGCUUCUUGUCCAGCUUUA | PS5MRdT * SfA * SmGmC * SmU * SmU * SmC | SSOSSSSSSSOSOSSSSSSSSS | 1612 |
| 9459 | UTU | * SmU * SmU * SmG * SmUmC * SmCfA * SmG | | |
| | | * SmC * SmU * SmU * SmU * SmA * SmU * | | |
| | | SAMC6T * SmU | | |
| WV- | TGUCCAGCUUUAUUGGGAGG | 5tzdT * SfG * SmUfC * SmCfA * SmGfC * SmU | SSOSOSOSSSOSSSSSSSSSSS | 1613 |
| 9460 | CTU | * SfU * SmUfA * SmU * SfU * SmG * SfG * | | |
| | | SmG * SfA * SmG * SfG * SmC * SAMC6T * | | |
| | | SmU | | |
| WV- | TGUCCAGCUUUAUUGGGAGG | 5tzdT * SfG * SmUmC * SmCmA * SmGmC * | SSOSOSOSSSOSSSSSSSSSSS | 1614 |
| 9461 | CTU | SmU * SmU * SmUmA * SmU * SfU * SmG * | | |
| | | SmG * SmG * SmA * SmG * SmG * SmC * | | |
| | | SAMC6T * SmU | | |
| WV- | TAGCUUCUUGUCCAGCUUUA | 5tzdT * SfA * SmGfC * SmU * SfU * SmC * SfU | SSOSSSSSSSOSOSSSSSSSSS | 1615 |
| 9462 | UTU | * SmU * SfG * SmUfC * SmCfA * SmG * SfC * | | |
| | | SmU * SfU * SmU * SfA * SmU * SAMC6T * | | |
| | | SmU | | |
| WV- | TAGCUUCUUGUCCAGCUUUA | 5tzdT * SfA * SmGmC * SmU * SmU * SmC * | SSOSSSSSSSOSOSSSSSSSSS | 1616 |
| 9463 | UTU | SmU * SmU * SmG * SmUmC * SmCfA * SmG * | | |
| | | SmC * SmU * SmU * SmU * SmA * SmU * | | |
| | | SAMC6T * SmU | | |
| WV- | TGUCCAGCUUUAUUGGGAGG | T * fG * mUmC * mCmA * mGmC * mUmU * | XXOXOXOXOXOXOXXXXXX | 1617 |
| 9475 | CTU | mUmA * mUfU * mG * mG * mG * mA * mG * | XXX | |
| | | mG * fC * T * mU | | |
| WV- | TGUCCAGCUUUAUUGGGAGG | T * fG * mUmC * mCmA * mGmC * mUmU * | XXOXOXOXOXOXOXXXXXX | 1618 |
| 9476 | CTU | mUmA * mUfU * mG * mG * mG * mA * mG * | XXX | |
| | | fG * fC * T * mU | | |
| WV- | TGUCCAGCUUUAUUGGGAGG | T * fG * mUmC * mCmA * mGmC * mUmU * | XXOXOXOXOXOXOXXXXXX | 1619 |
| 9477 | CTU | mUmA * mUfU * mG * mG * mG * mA * fG * | XXX | |
| | | fG * fC * T * mU | | |
| WV- | TGUCCAGCUUUAUUGGGAGG | T * fG * mUmC * mCmA * mGmC * mUmU * | XXOXOXOXOXOXOXXXXXX | 1620 |
| 9478 | CTU | mUmA * mUfU * mG * mG * mG * fA * fG * fG | XXX | |
| | | * fC * T * mU | | |
| WV- | TGUCCAGCUUUAUUGGGAGG | T * fG * mUmC * mCmA * mGmC * mUmU * | XXOXOXOXOXOXOXXXXXX | 1621 |
| 9479 | CTU | mUmA * mUfU * mG * mG * fG * fA * fG * fG | XXX | |
| | | * fC * T * mU | | |
| WV- | TGUCCAGCUUUAUUGGGAGG | T * fG * fUmC * mCmA * mGmC * mUmU * | XXOXOXOXOXOXOXXXXXX | 1622 |
| 9480 | CTU | mUmA * mUfU * mG * mG * mG * mA * mG * | XXX | |
| | | fG * fC * T * mU | | |
| WV- | TGUCCAGCUUUAUUGGGAGG | T * fG * fUfC * mCmA * mGmC * mUmU * | XXOXOXOXOXOXOXXXXXX | 1623 |
| 9481 | CTU | mUmA * mUfU * mG * mG * mG * mA * fG * | XXX | |
| | | fG * fC * T * mU | | |
| WV- | TGUCCAGCUUUAUUGGGAGG | T * fG * fUfC * fCmA * mGmC * mUmU * | XXOXOXOXOXOXOXXXXXX | 1624 |
| 9482 | CTU | mUmA * mUfU * mG * mG * mG * fA * fG * fG | XXX | |
| | | * fC * T * mU | | |
| WV- | TGUCCAGCUUUAUUGGGAGG | T * fG * fUfC * fCfA * mGmC * mUmU * | XXOXOXOXOXOXOXXXXXX | 1625 |
| 9483 | CTU | mUmA * mUfU * mG * mG * fG * fA * fG * fG | XXX | |
| | | * fC * T * mU | | |
| WV- | AGCTUCTTGTCCAGCUUUAU | Mod001L001mA * SGeom5CeoTeomU * SC * | OSOOOSSSSRSSRSSSSSSS | 1626 |
| 9526 | | ST * ST * SG * RT * SC * SC * RA * SG * SC * | | |
| | | SfU * SfU * SfU * SfA * SfU | | |
| WV- | AGCTUCTTGTCCAGCUUUAU | Mod001L001mA * SGeom5CeoTeomU * SC * | OSOOOSSSSRSSSSSSSSSS | 1627 |
| 9527 | | ST * ST * SG * RT * SC * SC * SA * SG * SC * | | |
| | | SfU * SfU * SfU * SfA * SfU | | |
| WV- | AGCTUCTTGTCCAGCUUUAU | Mod001L001mA * SGeom5CeoTeomU * SC * | OSOOOSSSSSSSRSSSSSSS | 1628 |
| 9528 | | ST * ST * SG * ST * SC * SC * RA * SG * SC * | | |
| | | SfU * SfU * SfU * SfA * SfU | | |
| WV- | AGCTUCTTGTCCAGCUUUAU | Mod001L001mA * Geom5CeoTeomU * C * T * | OXOOOXXXXXXXXXXXXXXX | 1629 |
| 9529 | | T * G * T * C * C * A * G * C * fU * fU * fU * fA | | |
| | | * fU | | |
| WV- | AGCTUCTTGTCCAGCUUUAU | mA * SGeom5CeoTeomU * SC * ST * ST * SG * | SOOOSSSSRSSRSSSSSSS | 1630 |
| 9530 | | RT * SC * SC * RA * SG * SC * SfU * SfU * SfU * | | |
| | | SfA * SfU | | |
| WV- | AGCTUCTTGTCCAGCUUUAU | mA * SGeom5CeoTeomU * SC * ST * ST * SG * | SOOOSSSSRSSSSSSSSSS | 1631 |
| 9531 | | RT * SC * SC * SA * SG * SC * SfU * SfU * SfU * | | |
| | | SfA * SfU | | |
| WV- | AGCTUCTTGTCCAGCUUUAU | mA * SGeom5CeoTeomU * SC * ST * ST * SG * | SOOOSSSSSSSRSSSSSSS | 1632 |
| 9532 | | ST * SC * SC * RA * SG * SC * SfU * SfU * SfU * | | |
| | | SfA * SfU | | |
| WV- | AGCTUCTTGTCCAGCUUUAU | mA * Geom5CeoTeomU * C * T * T * G * T * C | XOOOXXXXXXXXXXXXXXX | 1633 |
| 9533 | | * C * A * G * C * fU * fU * fU * fA * fU | | |
| WV- | AGCTTCTTGTCCAGCTTTAT | Mod083L001Aeo * SGeom5CeoTeoTeo * RC * | OSOOORSSSRSSRSSROOOS | 1634 |
| 9542 | | ST * ST * SG * RT * SC * SC * RA * SG * SC * | | |
| | | RTeoTeoTeoAeo * STeo | | |
| WV- | AGCTTCTTGTCCAGCTTTAT | Mod079L001Aeo * SGeom5CeoTeoTeo * RC * | OSOOORSSSRSSRSSROOOS | 1635 |
| 9543 | | ST * ST * SG * RT * SC * SC * RA * SG * SC * | | |
| | | RTeoTeoTeoAeo * STeo | | |
| WV- | AGCTTCTTGTCCAGCTTTAT | Mod080L001Aeo * SGeom5CeoTeoTeo * RC * | OSOOORSSSRSSRSSROOOS | 1636 |
| 9544 | | ST * ST * SG * RT * SC * SC * RA * SG * SC * | | |
| | | RTeoTeoTeoAeo * STeo | | |
| WV- | AGCTTCTTGTCCAGCTTTAT | Mod081L001Aeo * SGeom5CeoTeoTeo * RC * | OSOOORSSSRSSRSSROOOS | 1637 |
| 9545 | | ST * ST * SG * RT * SC * SC * RA * SG * SC * | | |
| | | RTeoTeoTeoAeo * STeo | | |
| WV- | AGCTTCTTGTCCAGCTTTAT | Mod082L001Aeo * SGeom5CeoTeoTeo * RC * | OSOOORSSSRSSRSSROOOS | 1638 |
| 9546 | | ST * ST * SG * RT * SC * SC * RA * SG * SC * | | |
| | | RTeoTeoTeoAeo * STeo | | |
| WV- | TAGCUUCUUGUCCAGCUUUA | Mod001L001T * SfA * SmGfC * SmU * SfU * | OSSOSSSSSSSOSOSSSSSSSS | 1639 |
| 9557 | UTU | SmC * SfU * SmU * SfG * SmUfC * SmCfA * | S | |
| | | SmG * SfC * SmU * SfU * SmU * SfA * SmU * | | |
| | | ST * SmU | | |
| WV- | TAGCUUCUUGUCCAGCUUUA | Mod001L0015MRdT * SfA * SmGfC * SmU * | OSSOSSSSSSSOSOSSSSSSSS | 1640 |
| 9558 | UTU | SfU * SmC * SfU * SmU * SfG * SmUfC * SmCfA | S | |
| | | * SmG * SfC * SmU * SfU * SmU * SfA * SmU * | | |
| | | ST * SmU | | |
| WV- | TAGCUUCUUGUCCAGCUUUA | Mod001L001T * SfA * SmGmC * SmU * SmU * | OSSOSSSSSSSOSOSSSSSSSS | 1641 |
| 9559 | UTU | SmC * SmU * SmU * SmG * SmUmC * SmCfA * | S | |
| | | SmG * SmC * SmU * SmU * SmU * SmA * SmU | | |
| | | * ST * SmU | | |
| WV- | TAGCUUCUUGUCCAGCUUUA | Mod001L0015MRdT * SfA * SmGmC * SmU * | OSSOSSSSSSSOSOSSSSSSSS | 1642 |
| 9560 | UTU | SmU * SmC * SmU * SmU * SmG * SmUmC * | S | |
| | | SmCfA * SmG * SmC * SmU * SmU * SmU * | | |
| | | SmA * SmU * ST * SmU | | |
| WV- | TGUCCAGCUUUAUUGGGAGG | Mod001L001T * SfG * SmUmC * SmCmA * | OSSOSOSOSSSOSSSSSSSSS | 1643 |
| 9561 | CTU | SmGmC * SmU * SmU * SmUmA * SmU * SfU | SS | |
| | | * SmG * SmG * SmG * SmA * SmG * SmG * | | |
| | | SmC * ST * SmU | | |
| WV- | TAGCUUCUUGUCCAGCUUUA | L001T * SfA * SmGfC * SmU * SfU * SmC * SfU | OSSOSSSSSSSOSOSSSSSSSS | 1644 |
| 9581 | UTU | * SmU * SfG * SmUfC * SmCfA * SmG * SfC * | S | |
| | | SmU * SfU * SmU * SfA * SmU * ST * SmU | | |
| WV- | TAGCUUCUUGUCCAGCUUUA | L0015MRdT * SfA * SmGfC * SmU * SfU * SmC | OSSOSSSSSSSOSOSSSSSSSS | 1645 |
| 9582 | UTU | * SfU * SmU * SfG * SmUfC * SmCfA * SmG * | S | |
| | | SfC * SmU * SfU * SmU * SfA * SmU * ST * | | |
| | | SmU | | |
| WV- | TAGCUUCUUGUCCAGCUUUA | L001T * SfA * SmGmC * SmU * SmU * SmC * | OSSOSSSSSSSOSOSSSSSSSS | 1646 |
| 9583 | UTU | SmU * SmU * SmG * SmUmC * SmCfA * SmG * | S | |
| | | SmC * SmU * SmU * SmU * SmA * SmU * ST * | | |
| | | SmU | | |
| WV- | TAGCUUCUUGUCCAGCUUUA | L0015MRdT * SfA * SmGmC * SmU * SmU * | OSSOSSSSSSSOSOSSSSSSSS | 1647 |
| 9584 | UTU | SmC * SmU * SmU * SmG * SmUmC * SmCfA * | S | |
| | | SmG * SmC * SmU * SmU * SmU * SmA * SmU | | |
| | | * ST * SmU | | |
| WV- | TGUCCAGCUUUAUUGGGAGG | L001T * SfG * SmUmC * SmCmA * SmGmC * | OSSOSOSOSSSOSSSSSSSSS | 1648 |
| 9585 | CTU | SmU * SmU * SmUmA * SmU * SfU * SmG * | SS | |
| | | SmG * SmG * SmA * SmG * SmG * SmC * ST * | | |
| | | SmU | | |
| WV- | TGCCACUGUAGAAAGGCAUG | L001T * SfG * SmCfC * SmAfC * SmUfG * | OSSOSOSOSOSOSOSSSSSS | 1649 |
| 9586 | ATU | SmUfA * SmGfA * SmAfA * SmG * SfG * SmC * | SSS | |
| | | SfA * SmU * SfG * SmA * ST * SmU | | |
| WV- | TGCCACUGUAGAAAGGCAUG | L0015MRdT * SfG * SmCfC * SmAfC * SmUfG * | OSSOSOSOSOSOSOSSSSSS | 1650 |
| 9587 | ATU | SmUfA * SmGfA * SmAfA * SmG * SfG * SmC * | SSS | |
| | | SfA * SmU * SfG * SmA * ST * SmU | | |
| WV- | TGCCACUGUAGAAAGGCAUG | L001T * SfG * SmCmC * SmAmC * SmUmG * | OSSOSOSOSOSOSOSSSSSS | 1651 |
| 9588 | ATU | SmUmA * SmGmA * SmAfA * SmG * SmG * | SSS | |
| | | SmC * SmA * SmU * SmG * SmA * ST * SmU | | |
| WV- | TGCCACUGUAGAAAGGCAUG | L0015MRdT * SfG * SmCmC * SmAmC * | OSSOSOSOSOSOSOSSSSSS | 1652 |
| 9589 | ATU | SmUmG * SmUmA * SmGmA * SmAfA * SmG * | SSS | |
| | | SmG * SmC * SmA * SmU * SmG * SmA * ST * | | |
| | | SmU | | |
| WV- | AGCTUCTTGTCCAGCUUUAU | L001mA * SGeom5CeoTeomU * SC * ST * ST * | OSOOOSSSSRSSRSSSSSSS | 1653 |
| 9590 | | SG * RT * SC * SC * RA * SG * SC * SfU * SfU * | | |
| | | SfU * SfA * SfU | | |
| WV- | AGCTUCTTGTCCAGCUUUAU | L001mA * SGeom5CeoTeomU * SC * ST * ST * | OSOOOSSSSRSSSSSSSSSS | 1654 |
| 9591 | | SG * RT * SC * SC * SA * SG * SC * SfU * SfU * | | |
| | | SfU * SfA * SfU | | |
| WV- | AGCTUCTTGTCCAGCUUUAU | L001mA * SGeom5CeoTeomU * SC * ST * ST * | OSOOOSSSSSSSRSSSSSSS | 1655 |
| 9592 | | SG * ST * SC * SC * RA * SG * SC * SfU * SfU * | | |
| | | SfU * SfA * SfU | | |
| WV- | AGCTUCTTGTCCAGCUUUAU | L001mA * Geom5CeoTeomU * C * T * T * G * | OXOOOXXXXXXXXXXXXXXX | 1656 |
| 9593 | | T * C * C * A * G * C * fU * fU * fU * fA * fU | | |
| WV- | TCACUGAGAAUACUGUCCCUU | T * fC * mAfC * mUfG * mAfG * mAfA * mUfA | XXOXOXOXOXOXOXXXXXX | 1657 |
| 9705 | TU | * mCfU * mG * fU * mC * fC * mC * fU * mU * | XXX | |
| | | T * mU | | |
| WV- | TCACUGAGAAUACUGUCCCUU | T * fC * mAmC * mUmG * mAmG * mAmA * | XXOXOXOXOXOXOXXXXXX | 1658 |
| 9706 | TU | mUmA * mCfU * mG * mU * mC * mC * mC * | XXX | |
| | | mU * mU * T * mU | | |
| WV- | TCACUGAGAAUACUGUCCCUU | T * SfC * SmAfC * SmUfG * SmAfG * SmAfA * | SSOSOSOSOSOSOSSSSSSSS | 1659 |
| 9707 | TU | SmUfA * SmCfU * SmG * SfU * SmC * SfC * | S | |
| | | SmC * SfU * SmU * ST * SmU | | |
| WV- | TCACUGAGAAUACUGUCCCUU | T * SfC * SmAmC * SmUmG * SmAmG * | SSOSOSOSOSOSOSSSSSSSS | 1660 |
| 9708 | TU | SmAmA * SmUmA * SmCfU * SmG * SmU * | S | |
| | | SmC * SmC * SmC * SmU * SmU * ST * SmU | | |
| WV- | TCACUGAGAAUACUGUCCCUU | T * fC * mAfC * mU * fG * mAfG * mAfA * mU | XXOXXXOXOXXXXXXXXXXX | 1661 |
| 9716 | TU | * fA * mC * fU * mG * fU * mC * fC * mC * fU * | XX | |
| | | mU * T * mU | | |
| WV- | TCACUGAGAAUACUGUCCCUU | T * fC * mA * fC * mU * fG * mAfG * mAfA * | XXXXXXOXOXXXXXXXXXXX | 1662 |
| 9717 | TU | mU * fA * mC * fU * mG * fU * mC * fC * mC * | XX | |
| | | fU * mU * T * mU | | |
| WV- | TCACUGAGAAUACUGUCCCUU | T * fC * mAfC * mU * fG * mA * fG * mAfA * | XXOXXXXXOXXXXXXXXXXX | 1663 |
| 9718 | TU | mU * fA * mC * fU * mG * fU * mC * fC * mC * | XX | |
| | | fU * mU * T * mU | | |
| WV- | TCACUGAGAAUACUGUCCCUU | T * fC * mAfC * mU * fG * mAfG * mA * fA * | XXOXXXOXXXXXXXXXXXXX | 1664 |
| 9719 | TU | mU * fA * mC * fU * mG * fU * mC * fC * mC * | XX | |
| | | fU * mU * T * mU | | |
| WV- | TCACUGAGAAUACUGUCCCUU | T * fC * mA * fC * mU * fG * mA * fG * mAfA * | XXXXXXXXOXXXXXXXXXXX | 1665 |
| 9720 | TU | mU * fA * mC * fU * mG * fU * mC * fC * mC * | XX | |
| | | fU * mU * T * mU | | |
| WV- | TCACUGAGAAUACUGUCCCUU | T * fC * mA * fC * mU * fG * mAfG * mA * fA * | XXXXXXOXXXXXXXXXXXXX | 1666 |
| 9721 | TU | mU * fA * mC * fU * mG * fU * mC * fC * mC * | XX | |
| | | fU * mU * T * mU | | |
| WV- | TCACUGAGAAUACUGUCCCUU | T * fC * mAfC * mU * fG * mA * fG * mA * fA * | XXOXXXXXXXXXXXXXXXXX | 1667 |
| 9722 | TU | mU * fA * mC * fU * mG * fU * mC * fC * mC * | XX | |
| | | fU * mU * T * mU | | |
| WV- | TCACUGAGAAUACUGUCCCUU | T * fC * mA * fC * mU * fG * mA * fG * mA * fA | XXXXXXXXXXXXXXXXXXXXX | 1668 |
| 9723 | TU | * mU * fA * mC * fU * mG * fU * mC * fC * mC | X | |
| | | * fU * mU * T * mU | | |
| WV- | TCACUGAGAAUACUGUCCCUU | T * fC * mAmC * mU * mG * mAmG * mAmA * | XXOXXXOXOXXXXXXXXXXX | 1669 |
| 9724 | TU | mU * mA * mC * fU * mG * mU * mC * mC * | XX | |
| | | mC * mU * mU * T * mU | | |
| WV- | TCACUGAGAAUACUGUCCCUU | T * fC * mA * mC * mU * mG * mAmG * | XXXXXXOXOXXXXXXXXXXX | 1670 |
| 9725 | TU | mAmA * mU * mA * mC * fU * mG * mU * mC | XX | |
| | | * mC * mC * mU * mU * T * mU | | |
| WV- | TCACUGAGAAUACUGUCCCUU | T * fC * mAmC * mU * mG * mA * mG * | XXOXXXXXOXXXXXXXXXXX | 1671 |
| 9726 | TU | mAmA * mU * mA * mC * fU * mG * mU * mC | XX | |
| | | * mC * mC * mU * mU * T * mU | | |
| WV- | TCACUGAGAAUACUGUCCCUU | T * fC * mAmC * mU * mG * mAmG * mA * | XXOXXXOXXXXXXXXXXXXX | 1672 |
| 9727 | TU | mA * mU * mA * mC * fU * mG * mU * mC * | XX | |
| | | mC * mC * mU * mU * T * mU | | |
| WV- | TCACUGAGAAUACUGUCCCUU | T * fC * mA * mC * mU * mG * mA * mG * | XXXXXXXXOXXXXXXXXXXX | 1673 |
| 9728 | TU | mAmA * mU * mA * mC * fU * mG * mU * mC | XX | |
| | | mC * mC * mU * mU * T * mU | | |
| WV- | TCACUGAGAAUACUGUCCCUU | T * fC * mA * mC * mU * mG * mAmG * mA * | XXXXXXOXXXXXXXXXXXXX | 1674 |
| 9729 | TU | mA * mU * mA * mC * fU * mG * mU * mC * | XX | |
| | | mC * mC * mU * mU * T * mU | | |
| WV- | TCACUGAGAAUACUGUCCCUU | T * fC * mAmC * mU * mG * mA * mG * mA * | XXOXXXXXXXXXXXXXXXXX | 1675 |
| 9730 | TU | mA * mU * mA * mC * fU * mG * mU * mC * | XX | |
| | | mC * mC * mU * mU * T * mU | | |
| WV- | TCACUGAGAAUACUGUCCCUU | T * fC * mA * mC * mU * mG * mA * mG * mA | XXXXXXXXXXXXXXXXXXXXX | 1676 |
| 9731 | TU | * mA * mU * mA * mC * fU * mG * mU * mC * | X | |
| | | mC * mC * mU * mU * T * mU | | |
| WV- | TGUCCAGCUUUAUUGGGAGG | VPT * SfG * SmUfC * SmCfA * SmGfC * SmU * | SSOSOSOSSSOSSSSSSSSSSS | 1677 |
| 9863 | CTU | SmU * SmUmA * SmU * SfU * SmG * SmG * | | |
| | | SmG * SmA * SmG * SmG * SmC * STGaNC6T * | | |
| | | SmU | | |
| WV- | TGUCCAGCUUUAUUGGGAGG | VPT * SfG * SmUmC * SmCmA * SmGmC * | SSOSOSOSSSOSSSSSSSSSSS | 1678 |
| 9864 | CTU | SmU * SmU * SmUmA * SmU * SfU * SmG * | | |
| | | SmG * SmG * SmA * SmG * SmG * SmC * | | |
| | | STGaNC6T * SmU | | |
| WV- | TAGCUUCUUGUCCAGCUUUA | VPT * SfA * SmGmC * SmU * SmU * SmC * | SSOSSSSSSSOSOSSSSSSSSS | 1679 |
| 9865 | UTU | SmU * SmU * SmG * SmUmC * SmCfA * SmG * | | |
| | | SmC * SmU * SmU * SmU * SmA * SmU * | | |
| | | STGaNC6T * SmU | | |
| WV- | AGCTTCTTGTCCAGCUUUAU | Mod001L001mA * Geom5CeoTeoTeo * C * T * | OXOOOXXXXXXXXXXXXXXX | 1680 |
| 9871 | | T * G * T * C * C * A * G * C * mU * mU * mU * | | |
| | | mA * mU | | |
| WV- | AGCTTCTTGTCCAGCUUUAU | Mod001L001mA * SGeom5CeoTeoTeo * RC * | OSOOORSSSRSSRSSSSSSS | 1681 |
| 9872 | | ST * ST * SG * RT * SC * SC * RA * SG * SC * | | |
| | | SmU * SmU * SmU * SmA * SmU | | |
| WV- | AGCTTCTTGTCCAGCTUUAU | Mod001L001mA * Geom5CeoTeoTeo * C * T * | OXOOOXXXXXXXXXXXXXXX | 1682 |
| 9873 | | T * G * T * C * C * A * G * C * Teo * mU * mU * | | |
| | | mA * mU | | |
| WV- | AGCTTCTTGTCCAGCTUUAU | Mod001L001mA * SGeom5CeoTeoTeo * RC * | OSOOORSSSRSSRSSRSSSS | 1683 |
| 9874 | | ST * ST * SG * RT * SC * SC * RA * SG * SC * | | |
| | | RTeo * SmU * SmU * SmA * SmU | | |
| WV- | TGUCCAGCUUUAUUGGGAGG | VPT * SfG * SmUfC * SmCfA * SmGfC * SmU * | SSOSOSOSSSOSSSSSSSSSSS | 1684 |
| 9880 | CTU | SmU * SmUmA * SmU * SfU * SmG * SmG * | | |
| | | SmG * SmA * SmG * SmG * SmC * SAMC6T * | | |
| | | SmU | | |
| WV- | TGUCCAGCUUUAUUGGGAGG | VPT * SfG * SmUmC * SmCmA * SmGmC * | SSOSOSOSSSOSSSSSSSSSSS | 1685 |
| 9881 | CTU | SmU * SmU * SmUmA * SmU * SfU * SmG * | | |
| | | SmG * SmG * SmA * SmG * SmG * SmC * | | |
| | | SAMC6T * SmU | | |
| WV- | TAGCUUCUUGUCCAGCUUUA | VPT * SfA * SmGmC * SmU * SmU * SmC * | SSOSSSSSSSOSOSSSSSSSSS | 1686 |
| 9882 | UTU | SmU * SmU * SmG * SmUmC * SmCfA * SmG * | | |
| | | SmC * SmU * SmU * SmU * SmA * SmU * | | |
| | | SAMC6T * SmU | | |
| WV- | AGCTTCTTGTCCAGCUUUAU | mA * Geom5CeoTeoTeo * C * T * T * G * T * C | XOOOXXXXXXXXXXXXXXX | 1687 |
| 9885 | | * C * A * G * C * mU * mU * mU * mA * mU | | |
| WV- | AGCTTCTTGTCCAGCUUUAU | mA * SGeom5CeoTeoTeo * RC * ST * ST * SG * | SOOORSSSRSSRSSSSSSS | 1688 |
| 9886 | | RT * SC * SC * RA * SG * SC * SmU * SmU * | | |
| | | SmU * SmA * SmU | | |
| WV- | AGCTTCTTGTCCAGCTUUAU | mA * Geom5CeoTeoTeo * C * T * T * G * T * C | XOOOXXXXXXXXXXXXXXX | 1689 |
| 9887 | | * C * A * G * C * Teo * mU * mU * mA * mU | | |
| WV- | AGCTTCTTGTCCAGCTUUAU | mA * SGeom5CeoTeoTeo * RC * ST * ST * SG * | SOOORSSSRSSRSSRSSSS | 1690 |
| 9888 | | RT * SC * SC * RA * SG * SC * RTeo * SmU * | | |
| | | SmU * SmA * SmU | | |
| WV- | AGCTTCTTGTCCAGCUUUAU | L001mA * Geom5CeoTeoTeo * C * T * T * G * | OXOOOXXXXXXXXXXXXXX | 1691 |
| 10243 | | T * C * C * A * G * C * mU * mU * mU * mA * | X | |
| | | mU | | |
| WV- | AGCTTCTTGTCCAGCUUUAU | L001mA * SGeom5CeoTeoTeo * RC * ST * ST * | OSOOORSSSRSSRSSSSSSS | 1692 |
| 10244 | | SG * RT * SC * SC * RA * SG * SC * SmU * SmU | | |
| | | * SmU * SmA * SmU | | |
| WV- | AGCTTCTTGTCCAGCTUUAU | L001mA * Geom5CeoTeoTeo * C * T * T * G * | OXOOOXXXXXXXXXXXXXX | 1693 |
| 10245 | | T * C * C * A * G * C * Teo * mU * mU * mA * | X | |
| | | mU | | |
| WV- | AGCTTCTTGTCCAGCTUUAU | L001mA * SGeom5CeoTeoTeo * RC * ST * ST * | OSOOORSSSRSSRSSRSSSS | 1694 |
| 10246 | | SG * RT * SC * SC * RA * SG * SC * RTeo * SmU | | |
| | | * SmU * SmA * SmU | | |
| WV- | TGUCCAGCUUUAUUGGGAGG | 5tzdT * SfG * SmUfC * SmCfA * SmGfC * SmU | SSOSOSOSSSOSSSSSSSSSS | 1695 |
| 10308 | CTU | * SfU * SmUfA * SmU * SfU * SmG * SfG * | S | |
| | | SmG * SfA * SmG * SfG * SmC * STGaNC6T * | | |
| | | SmU | | |
| WV- | TGUCCAGCUUUAUUGGGAGG | 5tzdT * SfG * SmUmC * SmCmA * SmGmC * | SSOSOSOSSSOSSSSSSSSSS | 1696 |
| 10309 | CTU | SmU * SmU * SmUmA * SmU * SfU * SmG * | S | |
| | | SmG * SmG * SmA * SmG * SmG * SmC * | | |
| | | STGaNC6T * SmU | | |
| WV- | TAGCUUCUUGUCCAGCUUUA | 5tzdT * SfA * SmGfC * SmU * SfU * SmC * SfU | SSOSSSSSSSOSOSSSSSSSSS | 1697 |
| 10310 | UTU | * SmU * SfG * SmUfC * SmCfA * SmG * SfC * | | |
| | | SmU * SfU * SmU * SfA * SmU * STGaNC6T * | | |
| | | SmU | | |
| WV- | TAGCUUCUUGUCCAGCUUUA | 5tzdT * SfA * SmGmC * SmU * SmU * SmC * | SSOSSSSSSSOSOSSSSSSSSS | 1698 |
| 10311 | UTU | SmU * SmU * SmG * SmUmC * SmCfA * SmG * | | |
| | | SmC * SmU * SmU * SmU * SmA * SmU * | | |
| | | STGaNC6T * SmU | | |
| WV- | TCCUUCCCUGAAGGUUCCUC | VPT * fC * mCfU * mUfC * mCfC * mUfG * | XXOXOXOXOXOXOXXXXXX | 1699 |
| 10312 | CTU | mAfA * mGfG * mU * fU * mC * fC * mU * fC * | XXX | |
| | | mC * T * mU | | |
| WV- | TCCUUCCCUGAAGGUUCCUC | VPT * fC * mCmU * mUmC * mCmC * mUmG * | XXOXOXOXOXOXOXXXXXX | 1700 |
| 10313 | CTU | mAmA * mGfG * mU * mU * mC * mC * mU * | XXX | |
| | | mC * mC * T * mU | | |
| WV- | TCCUUCCCUGAAGGUUCCUC | PO5MRdT * fC * mCfU * mUfC * mCfC * mUfG | XXOXOXOXOXOXOXXXXXX | 1701 |
| 10314 | CTU | * mAfA * mGfG * mU * fU * mC * fC * mU * fC | XXX | |
| | | * mC * T * mU | | |
| WV- | TCCUUCCCUGAAGGUUCCUC | PO5MRdT * fC * mCmU * mUmC * mCmC * | XXOXOXOXOXOXOXXXXXX | 1702 |
| 10315 | CTU | mUmG * mAmA * mGfG * mU * mU * mC * | XXX | |
| | | mC * mU * mC * mC * T * mU | | |
| WV- | TCCUUCCCUGAAGGUUCCUC | VPT * SfC * SmCfU * SmUfC * SmCfC * SmUfG | SSOSOSOSOSOSOSSSSSSSS | 1703 |
| 10316 | CTU | * SmAfA * SmGfG * SmU * SfU * SmC * SfC * | S | |
| | | SmU * SfC * SmC * ST * SmU | | |
| WV- | TCCUUCCCUGAAGGUUCCUC | VPT * SfC * SmCmU * SmUmC * SmCmC * | SSOSOSOSOSOSOSSSSSSSS | 1704 |
| 10317 | CTU | SmUmG * SmAmA * SmGfG * SmU * SmU * | S | |
| | | SmC * SmC * SmU * SmC * SmC * ST * SmU | | |
| WV- | TCCUUCCCUGAAGGUUCCUC | PO5MRdT * SfC * SmCfU * SmUfC * SmCfC * | SSOSOSOSOSOSOSSSSSSSS | 1705 |
| 10318 | CTU | SmUfG * SmAfA * SmGfG * SmU * SfU * SmC * | S | |
| | | SfC * SmU * SfC * SmC * ST * SmU | | |
| WV- | TCCUUCCCUGAAGGUUCCUC | PO5MRdT * SfC * SmCmU * SmUmC * SmCmC | SSOSOSOSOSOSOSSSSSSSS | 1706 |
| 10319 | CTU | * SmUmG * SmAmA * SmGfG * SmU * SmU * | S | |
| | | SmC * SmC * SmU * SmC * SmC * ST * SmU | | |
| WV- | TCACUGAGAAUACUGUCCCU | T * SfC * SmAmC * SmU * SmG * SmAmG * | SSOSSSOSOSSSSSSSSSSSSS | 1707 |
| 10471 | UTU | SmAmA * SmU * SmA * SmC * SfU * SmG * | | |
| | | SmU * SmC * SmC * SmC * SmU * SmU * ST * | | |
| | | SmU | | |
| WV- | TCACUGAGAAUACUGUCCCU | 5MRdT * SfC * SmAmC * SmU * SmG * | SSOSSSOSOSSSSSSSSSSSSS | 1708 |
| 10472 | UTU | SmAmG * SmAmA * SmU * SmA * SmC * SfU * | | |
| | | SmG * SmU * SmC * SmC * SmC * SmU * SmU | | |
| | | * ST * SmU | | |
| WV- | TCACUGAGAAUACUGUCCCU | PO5MRdT * SfC * SmAmC * SmU * SmG * | SSOSSSOSOSSSSSSSSSSSSS | 1709 |
| 10473 | UTU | SmAmG * SmAmA * SmU * SmA * SmC * SfU * | | |
| | | SmG * SmU * SmC * SmC * SmC * SmU * SmU | | |
| | | * ST * SmU | | |
| WV- | TCACUGAGAAUACUGUCCCU | VPT * SfC * SmAmC * SmU * SmG * SmAmG * | SSOSSSOSOSSSSSSSSSSSSS | 1710 |
| 10474 | UTU | SmAmA * SmU * SmA * SmC * SfU * SmG * | | |
| | | SmU * SmC * SmC * SmC * SmU * SmU * ST * | | |
| | | SmU | | |
| WV- | TCACUGAGAAUACUGUCCCU | T * SfC * SmAmC * SmU * SmG * SmAmG * | SSOSSSOSOSSSSSSSSSSSSS | 1711 |
| 10475 | UTU | SmAmA * SmU * SmA * SmC * SfU * SmG * | | |
| | | SmU * SmC * SmC * SmC * SmU * SmU * | | |
| | | STGaNC6T * SmU | | |
| WV- | TCACUGAGAAUACUGUCCCU | 5MRdT * SfC * SmAmC * SmU * SmG * | SSOSSSOSOSSSSSSSSSSSSS | 1712 |
| 10476 | UTU | SmAmG * SmAmA * SmU * SmA * SmC * SfU * | | |
| | | SmG * SmU * SmC * SmC * SmC * SmU * SmU | | |
| | | * STGaNC6T * SmU | | |
| WV- | TCACUGAGAAUACUGUCCCU | PO5MRdT * SfC * SmAmC * SmU * SmG * | SSOSSSOSOSSSSSSSSSSSSS | 1713 |
| 10477 | UTU | SmAmG * SmAmA * SmU * SmA * SmC * SfU * | | |
| | | SmG * SmU * SmC * SmC * SmC * SmU * SmU | | |
| | | * STGaNC6T * SmU | | |
| WV- | TCACUGAGAAUACUGUCCCU | VPT * SfC * SmAmC * SmU * SmG * SmAmG * | SSOSSSOSOSSSSSSSSSSSSS | 1714 |
| 10478 | UTU | SmAmA * SmU * SmA * SmC * SfU * SmG * | | |
| | | SmU * SmC * SmC * SmC * SmU * SmU * | | |
| | | STGaNC6T * SmU | | |
| WV- | TCACUGAGAAUACUGUCCCU | T * SfC * SmAmC * SmU * SmG * SmAmG * | SSOSSSOSOSSSSSSSSSSSSS | 1715 |
| 10479 | UTU | SmAmA * SmU * SmA * SmC * SfU * SmG * | | |
| | | SmU * SmC * SmC * SmC * SmU * SmU * | | |
| | | SAMC6T * SmU | | |
| WV- | TCACUGAGAAUACUGUCCCU | 5MRdT * SfC * SmAmC * SmU * SmG * | SSOSSSOSOSSSSSSSSSSSSS | 1716 |
| 10480 | UTU | SmAmG * SmAmA * SmU * SmA * SmC * SfU * | | |
| | | SmG * SmU * SmC * SmC * SmC * SmU * SmU | | |
| | | * SAMC6T * SmU | | |
| WV- | TCACUGAGAAUACUGUCCCU | PO5MRdT * SfC * SmAmC * SmU * SmG * | SSOSSSOSOSSSSSSSSSSSSS | 1717 |
| 10481 | UTU | SmAmG * SmAmA * SmU * SmA * SmC * SfU * | | |
| | | SmG * SmU * SmC * SmC * SmC * SmU * SmU | | |
| | | * SAMC6T * SmU | | |
| WV- | TCACUGAGAAUACUGUCCCU | VPT * SfC * SmAmC * SmU * SmG * SmAmG * | SSOSSSOSOSSSSSSSSSSSSS | 1718 |
| 10482 | UTU | SmAmA * SmU * SmA * SmC * SfU * SmG * | | |
| | | SmU * SmC * SmC * SmC * SmU * SmU * | | |
| | | SAMC6T * SmU | | |
| WV- | TCACUGAGAAUACUGUCCCU | 5tzdT * SfC * SmAmC * SmU * SmG * SmAmG | SSOSSSOSOSSSSSSSSSSSSS | 1719 |
| 10645 | UTU | * SmAmA * SmU * SmA * SmC * SfU * SmG * | | |
| | | SmU * SmC * SmC * SmC * SmU * SmU * ST * | | |
| | | SmU | | |
| WV- | TCACUGAGAAUACUGUCCCU | 5MRdT * SfC * SmAmC * SmUmG * SmAmG * | SSOSOSOSOSOSOSSSSSSSS | 1720 |
| 10646 | UTU | SmAmA * SmUmA * SmCfU * SmG * SmU * | S | |
| | | SmC * SmC * SmC * SmU * SmU * ST * SmU | | |
| WV- | TCACUGAGAAUACUGUCCCU | PO5MRdT * SfC * SmAmC * SmUmG * SmAmG | SSOSOSOSOSOSOSSSSSSSS | 1721 |
| 10647 | UTU | * SmAmA * SmUmA * SmCfU * SmG * SmU * | S | |
| | | SmC * SmC * SmC * SmU * SmU * ST * SmU | | |
| WV- | TCACUGAGAAUACUGUCCCU | VPT * SfC * SmAmC * SmUmG * SmAmG * | SSOSOSOSOSOSOSSSSSSSS | 1722 |
| 10648 | UTU | SmAmA * SmUmA * SmCfU * SmG * SmU * | S | |
| | | SmC * SmC * SmC * SmU * SmU * ST * SmU | | |
| WV- | TCACUGAGAAUACUGUCCCU | 5tzdT * SfC * SmAmC * SmUmG * SmAmG * | SSOSOSOSOSOSOSSSSSSSS | 1723 |
| 10649 | UTU | SmAmA * SmUmA * SmCfU * SmG * SmU * | S | |
| | | SmC * SmC * SmC * SmU * SmU * ST * SmU | | |
| WV- | TCACUGAGAAUACUGUCCCU | 5tzdT * SfC * SmAmC * SmU * SmG * SmAmG | SSOSSSOSOSSSSSSSSSSSSS | 1724 |
| 10650 | UTU | * SmAmA * SmU * SmA * SmC * SfU * SmG * | | |
| | | SmU * SmC * SmC * SmC * SmU * SmU * | | |
| | | STGaNC6T * SmU | | |
| WV- | TCACUGAGAAUACUGUCCCU | T * SfC * SmAmC * SmUmG * SmAmG * | SSOSOSOSOSOSOSSSSSSSS | 1725 |
| 10651 | UTU | SmAmA * SmUmA * SmCfU * SmG * SmU * | S | |
| | | SmC * SmC * SmC * SmU * SmU * STGaNC6T * | | |
| | | SmU | | |
| WV- | TCACUGAGAAUACUGUCCCU | 5MRdT * SfC * SmAmC * SmUmG * SmAmG * | SSOSOSOSOSOSOSSSSSSSS | 1726 |
| 10652 | UTU | SmAmA * SmUmA * SmCfU * SmG * SmU * | S | |
| | | SmC * SmC * SmC * SmU * SmU * STGaNC6T * | | |
| | | SmU | | |
| WV- | TCACUGAGAAUACUGUCCCU | PO5MRdT * SfC * SmAmC * SmUmG * SmAmG | SSOSOSOSOSOSOSSSSSSSS | 1727 |
| 10653 | UTU | * SmAmA * SmUmA * SmCfU * SmG * SmU * | S | |
| | | SmC * SmC * SmC * SmU * SmU * STGaNC6T * | | |
| | | SmU | | |
| WV- | TCACUGAGAAUACUGUCCCU | VPT * SfC * SmAmC * SmUmG * SmAmG * | SSOSOSOSOSOSOSSSSSSSS | 1728 |
| 10654 | UTU | SmAmA * SmUmA * SmCfU * SmG * SmU * | S | |
| | | SmC * SmC * SmC * SmU * SmU * STGaNC6T * | | |
| | | SmU | | |
| WV- | TCACUGAGAAUACUGUCCCU | 5tzdT * SfC * SmAmC * SmUmG * SmAmG * | SSOSOSOSOSOSOSSSSSSSS | 1729 |
| 10655 | UTU | SmAmA * SmUmA * SmCfU * SmG * SmU * | S | |
| | | SmC * SmC * SmC * SmU * SmU * STGaNC6T * | | |
| | | SmU | | |
| WV- | TCACUGAGAAUACUGUCCCU | 5tzdT * SfC * SmAmC * SmU * SmG * SmAmG | SSOSSSOSOSSSSSSSSSSSSS | 1730 |
| 10656 | UTU | * SmAmA * SmU * SmA * SmC * SfU * SmG * | | |
| | | SmU * SmC * SmC * SmC * SmU * SmU * | | |
| | | SAMC6T * SmU | | |
| WV- | TCACUGAGAAUACUGUCCCU | T * SfC * SmAmC * SmUmG * SmAmG * | SSOSOSOSOSOSOSSSSSSSS | 1731 |
| 10657 | UTU | SmAmA * SmUmA * SmCfU * SmG * SmU * | S | |
| | | SmC * SmC * SmC * SmU * SmU * SAMC6T * | | |
| | | SmU | | |
| WV- | TCACUGAGAAUACUGUCCCU | 5MRdT * SfC * SmAmC * SmUmG * SmAmG * | SSOSOSOSOSOSOSSSSSSSS | 1732 |
| 10658 | UTU | SmAmA * SmUmA * SmCfU * SmG * SmU * | S | |
| | | SmC * SmC * SmC * SmU * SmU * SAMC6T * | | |
| | | SmU | | |
| WV- | TCACUGAGAAUACUGUCCCU | PO5MRdT * SfC * SmAmC * SmUmG * SmAmG | SSOSOSOSOSOSOSSSSSSSS | 1733 |
| 10659 | UTU | * SmAmA * SmUmA * SmCfU * SmG * SmU * | S | |
| | | SmC * SmC * SmC * SmU * SmU * SAMC6T * | | |
| | | SmU | | |
| WV- | TCACUGAGAAUACUGUCCCU | VPT * SfC * SmAmC * SmUmG * SmAmG * | SSOSOSOSOSOSOSSSSSSSS | 1734 |
| 10660 | UTU | SmAmA * SmUmA * SmCfU * SmG * SmU * | S | |
| | | SmC * SmC * SmC * SmU * SmU * SAMC6T * | | |
| | | SmU | | |
| WV- | TCACUGAGAAUACUGUCCCU | 5tzdT * SfC * SmAmC * SmUmG * SmAmG * | SSOSOSOSOSOSOSSSSSSSS | 1735 |
| 10661 | UTU | SmAmA * SmUmA * SmCfU * SmG * SmU * | S | |
| | | SmC * SmC * SmC * SmU * SmU * SAMC6T * | | |
| | | SmU | | |
| WV- | TAGCUUCUUGUCCAGCUUUA | T * SfA * SmGmC * SmUmU * SmCmU * | SSOSOSOSOSOSOSSSSSSSS | 1736 |
| 10673 | UTU | SmUmG * SmUmC * SmCfA * SmG * SmC * | S | |
| | | SmU * SmU * SmU * SmA * SmU * STGaNC6T | | |
| | | * SmU | | |
| WV- | TAGCUUCUUGUCCAGCUUUA | 5MRdT * SfA * SmGmC * SmUmU * SmCmU * | SSOSOSOSOSOSOSSSSSSSS | 1737 |
| 10674 | UTU | SmUmG * SmUmC * SmCfA * SmG * SmC * | S | |
| | | SmU * SmU * SmU * SmA * SmU * STGaNC6T | | |
| | | * SmU | | |
| WV- | TAGCUUCUUGUCCAGCUUUA | PO5MRdT * SfA * SmGmC * SmUmU * SmCmU | SSOSOSOSOSOSOSSSSSSSS | 1738 |
| 10675 | UTU | * SmUmG * SmUmC * SmCfA * SmG * SmC * | S | |
| | | SmU * SmU * SmU * SmA * SmU * STGaNC6T | | |
| | | * SmU | | |
| WV- | TAGCUUCUUGUCCAGCUUUA | VPT * SfA * SmGmC * SmUmU * SmCmU * | SSOSOSOSOSOSOSSSSSSSS | 1739 |
| 10676 | UTU | SmUmG * SmUmC * SmCfA * SmG * SmC * | S | |
| | | SmU * SmU * SmU * SmA * SmU * STGaNC6T | | |
| | | * SmU | | |
| WV- | TAGCUUCUUGUCCAGCUUUA | 5tzdT * SfA * SmGmC * SmUmU * SmCmU * | SSOSOSOSOSOSOSSSSSSSS | 1740 |
| 10677 | UTU | SmUmG * SmUmC * SmCfA * SmG * SmC * | S | |
| | | SmU * SmU * SmU * SmA * SmU * STGaNC6T | | |
| | | * SmU | | |
| WV- | TAGCUUCUUGUCCAGCUUUA | T * SfA * SmGmC * SmUmU * SmCmU * | SSOSOSOSOSOSOSSSSSSSS | 1741 |
| 10678 | UTU | SmUmG * SmUmC * SmCfA * SmG * SmC * | S | |
| | | SmU * SmU * SmU * SmA * SmU * SAMC6T * | | |
| | | SmU | | |
| WV- | TAGCUUCUUGUCCAGCUUUA | 5MRdT * SfA * SmGmC * SmUmU * SmCmU * | SSOSOSOSOSOSOSSSSSSSS | 1742 |
| 10679 | UTU | SmUmG * SmUmC * SmCfA * SmG * SmC * | S | |
| | | SmU * SmU * SmU * SmA * SmU * SAMC6T * | | |
| | | SmU | | |
| WV- | TAGCUUCUUGUCCAGCUUUA | PO5MRdT * SfA * SmGmC * SmUmU * SmCmU | SSOSOSOSOSOSOSSSSSSSS | 1743 |
| 10680 | UTU | * SmUmG * SmUmC * SmCfA * SmG * SmC * | S | |
| | | SmU * SmU * SmU * SmA * SmU * SAMC6T * | | |
| | | SmU | | |
| WV- | TAGCUUCUUGUCCAGCUUUA | VPT * SfA * SmGmC * SmUmU * SmCmU * | SSOSOSOSOSOSOSSSSSSSS | 1744 |
| 10681 | UTU | SmUmG * SmUmC * SmCfA * SmG * SmC * | S | |
| | | SmU * SmU * SmU * SmA * SmU * SAMC6T * | | |
| | | SmU | | |
| WV- | TAGCUUCUUGUCCAGCUUUA | 5tzdT * SfA * SmGmC * SmUmU * SmCmU * | SSOSOSOSOSOSOSSSSSSSS | 1745 |
| 10682 | UTU | SmUmG * SmUmC * SmCfA * SmG * SmC * | S | |
| | | SmU * SmU * SmU * SmA * SmU * SAMC6T * | | |
| | | SmU | | |
| WV- | TUUUAAGCAACCUACAGGGG | T * fU * mUfU * mAfA * mGfC * mAfA * mCfC | XXOXOXOXOXOXOXXXXXX | 1746 |
| 10683 | CTU | * mUfA * mC * fA * mG * fG * mG * fG * mC * | XXX | |
| | | T * mU | | |
| WV- | TUUUUAAGCAACCUACAGGG | T * fU * mUfU * mUfA * mAfG * mCfA * mAfC | XXOXOXOXOXOXOXXXXXX | 1747 |
| 10684 | GTU | * mCfU * mA * fC * mA * fG * mG * fG * mG * | XXX | |
| | | T * mU | | |
| WV- | TCUUUUAAGCAACCUACAGG | T * fC * mUfU * mUfU * mAfA * mGfC * mAfA | XXOXOXOXOXOXOXXXXXX | 1748 |
| 10685 | GTU | * mCfC * mU * fA * mC * fA * mG * fG * mG * | XXX | |
| | | T * mU | | |
| WV- | TCCUUUUAAGCAACCUACAG | T * fC * mCfU * mUfU * mUfA * mAfG * mCfA | XXOXOXOXOXOXOXXXXXX | 1749 |
| 10686 | GTU | * mAfC * mC * fU * mA * fC * mA * fG * mG * | XXX | |
| | | T * mU | | |
| WV- | TCCCUUUUAAGCAACCUACA | T * fC * mCfC * mUfU * mUfU * mAfA * mGfC | XXOXOXOXOXOXOXXXXXX | 1750 |
| 10687 | GTU | * mAfA * mC * fC * mU * fA * mC * fA * mG * | XXX | |
| | | T * mU | | |
| WV- | TUCCCUUUUAAGCAACCUAC | T * fU * mCfC * mCfU * mUfU * mUfA * mAfG | XXOXOXOXOXOXOXXXXXX | 1751 |
| 10688 | ATU | * mCfA * mA * fC * mC * fU * mA * fC * mA * | XXX | |
| | | T * mU | | |
| WV- | TGUCCCUUUUAAGCAACCUA | T * fG * mUfC * mCfC * mUfU * mUfU * mAfA | XXOXOXOXOXOXOXXXXXX | 1752 |
| 10689 | CTU | * mGfC * mA * fA * mC * fC * mU * fA * mC * | XXX | |
| | | T * mU | | |
| WV- | TUGUCCCUUUUAAGCAACCU | T * fU * mGfU * mCfC * mCfU * mUfU * mUfA | XXOXOXOXOXOXOXXXXXX | 1753 |
| 10690 | ATU | * mAfG * mC * fA * mA * fC * mC * fU * mA * | XXX | |
| | | T * mU | | |
| WV- | TCUGUCCCUUUUAAGCAACC | T * fC * mUfG * mUfC * mCfC * mUfU * mUfU | XXOXOXOXOXOXOXXXXXX | 1754 |
| 10691 | UTU | * mAfA * mG * fC * mA * fA * mC * fC * mU * | XXX | |
| | | T * mU | | |
| WV- | TACUGUCCCUUUUAAGCAAC | T * fA * mCfU * mGfU * mCfC * mCfU * mUfU | XXOXOXOXOXOXOXXXXXX | 1755 |
| 10692 | CTU | * mUfA * mA * fG * mC * fA * mA * fC * mC * | XXX | |
| | | T * mU | | |
| WV- | TUACUGUCCCUUUUAAGCAA | T * fU * mAfC * mUfG * mUfC * mCfC * mUfU | XXOXOXOXOXOXOXXXXXX | 1756 |
| 10693 | CTU | * mUfU * mA * fA * mG * fC * mA * fA * mC * | XXX | |
| | | T * mU | | |
| WV- | TAUACUGUCCCUUUUAAGCA | T * fA * mUfA * mCfU * mGfU * mCfC * mCfU | XXOXOXOXOXOXOXXXXXX | 1757 |
| 10694 | ATU | * mUfU * mU * fA * mA * fG * mC * fA * mA * | XXX | |
| | | T * mU | | |
| WV- | TAAUACUGUCCCUUUUAAGC | T * fA * mAfU * mAfC * mUfG * mUfC * mCfC | XXOXOXOXOXOXOXXXXXX | 1758 |
| 10695 | ATU | * mUfU * mU * fU * mA * fA * mG * fC * mA * | | |
| | | XXX | | |
| | | T * mU | | |
| WV- | TGAAUACUGUCCCUUUUAAG | T * fG * mAfA * mUfA * mCfU * mGfU * mCfC | XXOXOXOXOXOXOXXXXXX | 1759 |
| 10696 | CTU | * mCfU * mU * fU * mU * fA * mA * fG * mC * | XXX | |
| | | T * mU | | |
| WV- | TAGAAUACUGUCCCUUUUAA | T * fA * mGfA * mAfU * mAfC * mUfG * mUfC | XXOXOXOXOXOXOXXXXXX | 1760 |
| 10697 | GTU | * mCfC * mU * fU * mU * fU * mA * fA * mG * | XXX | |
| | | T * mU | | |
| WV- | TGAGAAUACUGUCCCUUUUA | T * fG * mAfG * mAfA * mUfA * mCfU * mGfU | XXOXOXOXOXOXOXXXXXX | 1761 |
| 10698 | ATU | * mCfC * mC * fU * mU * fU * mU * fA * mA * | XXX | |
| | | T * mU | | |
| WV- | TUGAGAAUACUGUCCCUUUU | T * fU * mGfA * mGfA * mAfU * mAfC * mUfG | XXOXOXOXOXOXOXXXXXX | 1762 |
| 10699 | ATU | * mUfC * mC * fC * mU * fU * mU * fU * mA * | XXX | |
| | | T * mU | | |
| WV- | TCUGAGAAUACUGUCCCUUU | T * fC * mUfG * mAfG * mAfA * mUfA * mCfU | XXOXOXOXOXOXOXXXXXX | 1763 |
| 10700 | UTU | * mGfU * mC * fC * mC * fU * mU * fU * mU * | XXX | |
| | | T * mU | | |
| WV- | TACUGAGAAUACUGUCCCUU | T * fA * mCfU * mGfA * mGfA * mAfU * mAfC | XXOXOXOXOXOXOXXXXXX | 1764 |
| 10701 | UTU | * mUfG * mU * fC * mC * fC * mU * fU * mU * | XXX | |
| | | T * mU | | |
| WV- | TGCACUGAGAAUACUGUCCC | T * fG * mCfA * mCfU * mGfA * mGfA * mAfU | XXOXOXOXOXOXOXXXXXX | 1765 |
| 10702 | UTU | * mAfC * mU * fG * mU * fC * mC * fC * mU * | XXX | |
| | | T * mU | | |
| WV- | TAGCACUGAGAAUACUGUCC | T * fA * mGfC * mAfC * mUfG * mAfG * mAfA | XXOXOXOXOXOXOXXXXXX | 1766 |
| 10703 | CTU | * mUfA * mC * fU * mG * fU * mC * fC * mC * | XXX | |
| | | T * mU | | |
| WV- | TGAGCACUGAGAAUACUGUC | T * fG * mAfG * mCfA * mCfU * mGfA * mGfA | XXOXOXOXOXOXOXXXXXX | 1767 |
| 10704 | CTU | * mAfU * mA * fC * mU * fG * mU * fC * mC * | XXX | |
| | | T * mU | | |
| WV- | TAGAGCACUGAGAAUACUGU | T * fA * mGfA * mGfC * mAfC * mUfG * mAfG | XXOXOXOXOXOXOXXXXXX | 1768 |
| 10705 | CTU | * mAfA * mU * fA * mC * fU * mG * fU * mC * | XXX | |
| | | T * mU | | |
| WV- | TGAGAGCACUGAGAAUACUG | T * fG * mAfG * mAfG * mCfA * mCfU * mGfA | XXOXOXOXOXOXOXXXXXX | 1769 |
| 10706 | UTU | * mGfA * mA * fU * mA * fC * mU * fG * mU * | XXX | |
| | | T * mU | | |
| WV- | TGGAGAGCACUGAGAAUACU | T * fG * mGfA * mGfA * mGfC * mAfC * mUfG | XXOXOXOXOXOXOXXXXXX | 1770 |
| 10707 | GTU | * mAfG * mA * fA * mU * fA * mC * fU * mG * | XXX | |
| | | T * mU | | |
| WV- | TAGGAGAGCACUGAGAAUAC | T * fA * mGfG * mAfG * mAfG * mCfA * mCfU | XXOXOXOXOXOXOXXXXXX | 1771 |
| 10708 | UTU | * mGfA * mG * fA * mA * fU * mA * fC * mU * | XXX | |
| | | T * mU | | |
| WV- | TUAGGAGAGCACUGAGAAUA | T * fU * mAfG * mGfA * mGfA * mGfC * mAfC | XXOXOXOXOXOXOXXXXXX | 1772 |
| 10709 | CTU | * mUfG * mA * fG * mA * fA * mU * fA * mC * | XXX | |
| | | T * mU | | |
| WV- | TGUAGGAGAGCACUGAGAAU | T * fG * mUfA * mGfG * mAfG * mAfG * mCfA | XXOXOXOXOXOXOXXXXXX | 1773 |
| 10710 | ATU | * mCfU * mG * fA * mG * fA * mA * fU * mA * | XXX | |
| | | T * mU | | |
| WV- | TGGUAGGAGAGCACUGAGAA | T * fG * mGfU * mAfG * mGfA * mGfA * mGfC | XXOXOXOXOXOXOXXXXXX | 1774 |
| 10711 | UTU | * mAfC * mU * fG * mA * fG * mA * fA * mU * | XXX | |
| | | T * mU | | |
| WV- | TGGGUAGGAGAGCACUGAGA | T * fG * mGfG * mUfA * mGfG * mAfG * mAfG | XXOXOXOXOXOXOXXXXXX | 1775 |
| 10712 | ATU | * mCfA * mC * fU * mG * fA * mG * fA * mA * | XXX | |
| | | T * mU | | |
| WV- | TGGGGUAGGAGAGCACUGAG | T * fG * mGfG * mGfU * mAfG * mGfA * mGfA | XXOXOXOXOXOXOXXXXXX | 1776 |
| 10713 | ATU | * mGfC * mA * fC * mU * fG * mA * fG * mA * | XXX | |
| | | T * mU | | |
| WV- | TUGGGGUAGGAGAGCACUGA | T * fU * mGfG * mGfG * mUfA * mGfG * mAfG | XXOXOXOXOXOXOXXXXXX | 1777 |
| 10714 | GTU | * mAfG * mC * fA * mC * fU * mG * fA * mG * | XXX | |
| | | T * mU | | |
| WV- | TGUGGGGUAGGAGAGCACU | T * fG * mUfG * mGfG * mGfU * mAfG * mGfA | XXOXOXOXOXOXOXXXXXX | 1778 |
| 10715 | GATU | * mGfA * mG * fC * mA * fC * mU * fG * mA * | XXX | |
| | | T * mU | | |
| WV- | TGGUGGGGUAGGAGAGCAC | T * fG * mGfU * mGfG * mGfG * mUfA * mGfG | XXOXOXOXOXOXOXXXXXX | 1779 |
| 10716 | UGTU | * mAfG * mA * fG * mC * fA * mC * fU * mG * | XXX | |
| | | T * mU | | |
| WV- | TAGGUGGGGUAGGAGAGCAC | T * fA * mGfG * mUfG * mGfG * mGfU * mAfG | XXOXOXOXOXOXOXXXXXX | 1780 |
| 10717 | UTU | * mGfA * mG * fA * mG * fC * mA * fC * mU * | XXX | |
| | | T * mU | | |
| WV- | TGAGGUGGGGUAGGAGAGC | T * fG * mAfG * mGfU * mGfG * mGfG * mUfA | XXOXOXOXOXOXOXXXXXX | 1781 |
| 10718 | ACTU | * mGfG * mA * fG * mA * fG * mC * fA * mC * | XXX | |
| | | T * mU | | |
| WV- | TUGAGGUGGGGUAGGAGAG | T * fU * mGfA * mGfG * mUfG * mGfG * mGfU | XXOXOXOXOXOXOXXXXXX | 1782 |
| 10719 | CATU | * mAfG * mG * fA * mG * fA * mG * fC * mA * | XXX | |
| | | T * mU | | |
| WV- | TAUGAGGUGGGGUAGGAGA | T * fA * mUfG * mAfG * mGfU * mGfG * mGfG | XXOXOXOXOXOXOXXXXXX | 1783 |
| 10720 | GCTU | * mUfA * mG * fG * mA * fG * mA * fG * mC * | XXX | |
| | | T * mU | | |
| WV- | TCAUGAGGUGGGGUAGGAG | T * fC * mAfU * mGfA * mGfG * mUfG * mGfG | XXOXOXOXOXOXOXXXXXX | 1784 |
| 10721 | AGTU | * mGfU * mA * fG * mG * fA * mG * fA * mG * | XXX | |
| | | T * mU | | |
| WV- | TGCAUGAGGUGGGGUAGGA | T * fG * mCfA * mUfG * mAfG * mGfU * mGfG | XXOXOXOXOXOXOXXXXXX | 1785 |
| 10722 | GATU | * mGfG * mU * fA * mG * fG * mA * fG * mA * | XXX | |
| | | T * mU | | |
| WV- | TUUAAGCAACCUACAGGGGC | T * fU * mUmA * mAmG * mCmA * mAmC * | XXOXOXOXOXOXOXXXXXX | 1786 |
| 10723 | ATU | mCmU * mAfC * mA * mG * mG * mG * mG * | XXX | |
| | | mC * mA * T * mU | | |
| WV- | TUUUAAGCAACCUACAGGGG | T * fU * mUmU * mAmA * mGmC * mAmA * | XXOXOXOXOXOXOXXXXXX | 1787 |
| 10724 | CTU | mCmC * mUfA * mC * mA * mG * mG * mG * | XXX | |
| | | mG * mC * T * mU | | |
| WV- | TUUUUAAGCAACCUACAGGG | T * fU * mUmU * mUmA * mAmG * mCmA * | XXOXOXOXOXOXOXXXXXX | 1788 |
| 10725 | GTU | mAmC * mCfU * mA * mC * mA * mG * mG * | XXX | |
| | | mG * mG * T * mU | | |
| WV- | TCUUUUAAGCAACCUACAGG | T * fC * mUmU * mUmU * mAmA * mGmC * | XXOXOXOXOXOXOXXXXXX | 1789 |
| 10726 | GTU | mAmA * mCfC * mU * mA * mC * mA * mG * | XXX | |
| | | mG * mG * T * mU | | |
| WV- | TCCUUUUAAGCAACCUACAG | T * fC * mCmU * mUmU * mUmA * mAmG * | XXOXOXOXOXOXOXXXXXX | 1790 |
| 10727 | GTU | mCmA * mAfC * mC * mU * mA * mC * mA * | XXX | |
| | | mG * mG * T * mU | | |
| WV- | TCCCUUUUAAGCAACCUACA | T * fC * mCmC * mUmU * mUmU * mAmA * | XXOXOXOXOXOXOXXXXXX | 1791 |
| 10728 | GTU | mGmC * mAfA * mC * mC * mU * mA * mC * | XXX | |
| | | mA * mG * T * mU | | |
| WV- | TUCCCUUUUAAGCAACCUAC | T * fU * mCmC * mCmU * mUmU * mUmA * | XXOXOXOXOXOXOXXXXXX | 1792 |
| 10729 | ATU | mAmG * mCfA * mA * mC * mC * mU * mA * | XXX | |
| | | mC * mA * T * mU | | |
| WV- | TGUCCCUUUUAAGCAACCUA | T * fG * mUmC * mCmC * mUmU * mUmU * | XXOXOXOXOXOXOXXXXXX | 1793 |
| 10730 | CTU | mAmA * mGfC * mA * mA * mC * mC * mU * | XXX | |
| | | mA * mC * T * mU | | |
| WV- | TUGUCCCUUUUAAGCAACCU | T * fU * mGmU * mCmC * mCmU * mUmU * | XXOXOXOXOXOXOXXXXXX | 1794 |
| 10731 | ATU | mUmA * mAfG * mC * mA * mA * mC * mC * | XXX | |
| | | mU * mA * T * mU | | |
| WV- | TCUGUCCCUUUUAAGCAACC | T * fC * mUmG * mUmC * mCmC * mUmU * | XXOXOXOXOXOXOXXXXXX | 1795 |
| 10732 | UTU | mUmU * mAfA * mG * mC * mA * mA * mC * | XXX | |
| | | mC * mU * T * mU | | |
| WV- | TACUGUCCCUUUUAAGCAAC | T * fA * mCmU * mGmU * mCmC * mCmU * | XXOXOXOXOXOXOXXXXXX | 1796 |
| 10733 | CTU | mUmU * mUfA * mA * mG * mC * mA * mA * | XXX | |
| | | mC * mC * T * mU | | |
| WV- | TUACUGUCCCUUUUAAGCAA | T * fU * mAmC * mUmG * mUmC * mCmC * | XXOXOXOXOXOXOXXXXXX | 1797 |
| 10734 | CTU | mUmU * mUfU * mA * mA * mG * mC * mA * | XXX | |
| | | mA * mC * T * mU | | |
| WV- | TAUACUGUCCCUUUUAAGCA | T * fA * mUmA * mCmU * mGmU * mCmC * | XXOXOXOXOXOXOXXXXXX | 1798 |
| 10735 | ATU | mCmU * mUfU * mU * mA * mA * mG * mC * | XXX | |
| | | mA * mA * T * mU | | |
| WV- | TAAUACUGUCCCUUUUAAGC | T * fA * mAmU * mAmC * mUmG * mUmC * | XXOXOXOXOXOXOXXXXXX | 1799 |
| 10736 | ATU | mCmC * mUfU * mU * mU * mA * mA * mG * | XXX | |
| | | mC * mA * T * mU | | |
| WV- | TGAAUACUGUCCCUUUUAAG | T * fG * mAmA * mUmA * mCmU * mGmU * | XXOXOXOXOXOXOXXXXXX | 1800 |
| 10737 | CTU | mCmC * mCfU * mU * mU * mU * mA * mA * | XXX | |
| | | mG * mC * T * mU | | |
| WV- | TAGAAUACUGUCCCUUUUAA | T * fA * mGmA * mAmU * mAmC * mUmG * | XXOXOXOXOXOXOXXXXXX | 1801 |
| 10738 | GTU | mUmC * mCfC * mU * mU * mU * mU * mA * | XXX | |
| | | mA * mG * T * mU | | |
| WV- | TGAGAAUACUGUCCCUUUUA | T * fG * mAmG * mAmA * mUmA * mCmU * | XXOXOXOXOXOXOXXXXXX | 1802 |
| 10739 | ATU | mGmU * mCfC * mC * mU * mU * mU * mU * | XXX | |
| | | mA * mA * T * mU | | |
| WV- | TUGAGAAUACUGUCCCUUUU | T * fU * mGmA * mGmA * mAmU * mAmC * | XXOXOXOXOXOXOXXXXXX | 1803 |
| 10740 | ATU | mUmG * mUfC * mC * mC * mU * mU * mU * | XXX | |
| | | mU * mA * T * mU | | |
| WV- | TCUGAGAAUACUGUCCCUUU | T * fC * mUmG * mAmG * mAmA * mUmA * | XXOXOXOXOXOXOXXXXXX | 1804 |
| 10741 | UTU | mCmU * mGfU * mC * mC * mC * mU * mU * | XXX | |
| | | mU * mU * T * mU | | |
| WV- | TACUGAGAAUACUGUCCCUU | T * fA * mCmU * mGmA * mGmA * mAmU * | XXOXOXOXOXOXOXXXXXX | 1805 |
| 10742 | UTU | mAmC * mUfG * mU * mC * mC * mC * mU * | XXX | |
| | | mU * mU * T * mU | | |
| WV- | TGCACUGAGAAUACUGUCCC | T * fG * mCmA * mCmU * mGmA * mGmA * | XXOXOXOXOXOXOXXXXXX | 1806 |
| 10743 | UTU | mAmU * mAfC * mU * mG * mU * mC * mC * | XXX | |
| | | mC * mU * T * mU | | |
| WV- | TAGCACUGAGAAUACUGUCC | T * fA * mGmC * mAmC * mUmG * mAmG * | XXOXOXOXOXOXOXXXXXX | 1807 |
| 10744 | CTU | mAmA * mUfA * mC * mU * mG * mU * mC * | XXX | |
| | | mC * mC * T * mU | | |
| WV- | TGAGCACUGAGAAUACUGUC | T * fG * mAmG * mCmA * mCmU * mGmA * | XXOXOXOXOXOXOXXXXXX | 1808 |
| 10745 | CTU | mGmA * mAfU * mA * mC * mU * mG * mU * | XXX | |
| | | mC * mC * T * mU | | |
| WV- | TAGAGCACUGAGAAUACUGU | T * fA * mGmA * mGmC * mAmC * mUmG * | XXOXOXOXOXOXOXXXXXX | 1809 |
| 10746 | CTU | mAmG * mAfA * mU * mA * mC * mU * mG * | XXX | |
| | | mU * mC * T * mU | | |
| WV- | TGAGAGCACUGAGAAUACUG | T * fG * mAmG * mAmG * mCmA * mCmU * | XXOXOXOXOXOXOXXXXXX | 1810 |
| 10747 | UTU | mGmA * mGfA * mA * mU * mA * mC * mU * | XXX | |
| | | mG * mU * T * mU | | |
| WV- | TGGAGAGCACUGAGAAUACU | T * fG * mGmA * mGmA * mGmC * mAmC * | XXOXOXOXOXOXOXXXXXX | 1811 |
| 10748 | GTU | mUmG * mAfG * mA * mA * mU * mA * mC * | XXX | |
| | | mU * mG * T * mU | | |
| WV- | TAGGAGAGCACUGAGAAUAC | T * fA * mGmG * mAmG * mAmG * mCmA * | XXOXOXOXOXOXOXXXXXX | 1812 |
| 10749 | UTU | mCmU * mGfA * mG * mA * mA * mU * mA * | XXX | |
| | | mC * mU * T * mU | | |
| WV- | TUAGGAGAGCACUGAGAAUA | T * fU * mAmG * mGmA * mGmA * mGmC * | XXOXOXOXOXOXOXXXXXX | 1813 |
| 10750 | CTU | mAmC * mUfG * mA * mG * mA * mA * mU * | XXX | |
| | | mA * mC * T * mU | | |
| WV- | TGUAGGAGAGCACUGAGAAU | T * fG * mUmA * mGmG * mAmG * mAmG * | XXOXOXOXOXOXOXXXXXX | 1814 |
| 10751 | ATU | mCmA * mCfU * mG * mA * mG * mA * mA * | XXX | |
| | | mU * mA * T * mU | | |
| WV- | TGGUAGGAGAGCACUGAGAA | T * fG * mGmU * mAmG * mGmA * mGmA * | XXOXOXOXOXOXOXXXXXX | 1815 |
| 10752 | UTU | mGmC * mAfC * mU * mG * mA * mG * mA * | XXX | |
| | | mA * mU * T * mU | | |
| WV- | TGGGUAGGAGAGCACUGAGA | T * fG * mGmG * mUmA * mGmG * mAmG * | XXOXOXOXOXOXOXXXXXX | 1816 |
| 10753 | ATU | mAmG * mCfA * mC * mU * mG * mA * mG * | XXX | |
| | | mA * mA * T * mU | | |
| WV- | TGGGGUAGGAGAGCACUGAG | T * fG * mGmG * mGmU * mAmG * mGmA * | XXOXOXOXOXOXOXXXXXX | 1817 |
| 10754 | ATU | mGmA * mGfC * mA * mC * mU * mG * mA * | XXX | |
| | | mG * mA * T * mU | | |
| WV- | TUGGGGUAGGAGAGCACUGA | T * fU * mGmG * mGmG * mUmA * mGmG * | XXOXOXOXOXOXOXXXXXX | 1818 |
| 10755 | GTU | mAmG * mAfG * mC * mA * mC * mU * mG * | XXX | |
| | | mA * mG * T * mU | | |
| WV- | TGUGGGGUAGGAGAGCACU | T * fG * mUmG * mGmG * mGmU * mAmG * | XXOXOXOXOXOXOXXXXXX | 1819 |
| 10756 | GATU | mGmA * mGfA * mG * mC * mA * mC * mU * | XXX | |
| | | mG * mA * T * mU | | |
| WV- | TGGUGGGGUAGGAGAGCAC | T * fG * mGmU * mGmG * mGmG * mUmA * | XXOXOXOXOXOXOXXXXXX | 1820 |
| 10757 | UGTU | mGmG * mAfG * mA * mG * mC * mA * mC * | XXX | |
| | | mU * mG * T * mU | | |
| WV- | TAGGUGGGGUAGGAGAGCAC | T * fA * mGmG * mUmG * mGmG * mGmU * | XXOXOXOXOXOXOXXXXXX | 1821 |
| 10758 | UTU | mAmG * mGfA * mG * mA * mG * mC * mA * | XXX | |
| | | mC * mU * T * mU | | |
| WV- | TGAGGUGGGGUAGGAGAGC | T * fG * mAmG * mGmU * mGmG * mGmG * | XXOXOXOXOXOXOXXXXXX | 1822 |
| 10759 | ACTU | mUmA * mGfG * mA * mG * mA * mG * mC * | XXX | |
| | | mA * mC * T * mU | | |
| WV- | TUGAGGUGGGGUAGGAGAG | T * fU * mGmA * mGmG * mUmG * mGmG * | XXOXOXOXOXOXOXXXXXX | 1823 |
| 10760 | CATU | mGmU * mAfG * mG * mA * mG * mA * mG * | XXX | |
| | | mC * mA * T * mU | | |
| WV- | TAUGAGGUGGGGUAGGAGA | T * fA * mUmG * mAmG * mGmU * mGmG * | XXOXOXOXOXOXOXXXXXX | 1824 |
| 10761 | GCTU | mGmG * mUfA * mG * mG * mA * mG * mA * | XXX | |
| | | mG * mC * T * mU | | |
| WV- | TCAUGAGGUGGGGUAGGAG | T * fC * mAmU * mGmA * mGmG * mUmG * | XXOXOXOXOXOXOXXXXXX | 1825 |
| 10762 | AGTU | mGmG * mGfU * mA * mG * mG * mA * mG * | XXX | |
| | | mA * mG * T * mU | | |
| WV- | TGCAUGAGGUGGGGUAGGA | T * fG * mCmA * mUmG * mAmG * mGmU * | XXOXOXOXOXOXOXXXXXX | 1826 |
| 10763 | GATU | mGmG * mGfG * mU * mA * mG * mG * mA * | XXX | |
| | | mG * mA * T * mU | | |
| WV- | TUUAAGCAACCUACAGGGGC | T * fU * mUfA * mAfG * mCfA * mAfC * mCfU | XXOXOXOXOXOXOXXXXXX | 1827 |
| 10764 | ATU | * mAfC * mA * fG * mG * fG * mG * fC * mA * | XXX | |
| | | T * mU | | |
| WV- | TGCCACUGUAGAAAGGCAUG | PO5MRdT * SfG * SmC * SmC * SmAmC * | SSSSOSOSOSOSOSSSSSSSS | 1828 |
| 12499 | ATU | SmUmG * SmUmA * SmGmA * SmAfA * SmG * | S | |
| | | SmG * SmC * SmA * SmU * SmG * SmA * | | |
| | | STGaNC6T * SmU | | |
| WV- | TGCCACUGUAGAAAGGCAUG | PO5MRdT * SfG * SmC * SmC * SmAmC * | SSSSOSOSOSOSOSSSSSSSS | 1829 |
| 12500 | ATU | SmUmG * SmUmA * SmGmA * SmAfA * SmG * | S | |
| | | SmG * SmC * SmA * SmU * SmG * SmA * | | |
| | | SAMC6T * SmU | | |
| WV- | TGCCACUGUAGAAAGGCAUG | PO5MRdT * SfG * SmC5MSmC * SmAmC * | SSOSOSOSOSOSOSSSSSSSS | 1830 |
| 12501 | ATU | SmUmG * SmUmA * SmGmA * SmAfA * SmG * | S | |
| | | SmG * SmC * SmA * SmU * SmG * SmA * | | |
| | | STGaNC6T * SmU | | |
| WV- | TGCCACUGUAGAAAGGCAUG | PO5MRdT * SfG * SmC5MSmC * SmAmC * | SSOSOSOSOSOSOSSSSSSSS | 1831 |
| 12502 | ATU | SmUmG * SmUmA * SmGmA * SmAfA * SmG * | S | |
| | | SmG * SmC * SmA * SmU * SmG * SmA * | | |
| | | SAMC6T * SmU | | |
| WV- | GCACTGAGAATACTGTCCCT | Geo * m5CeoAeom5CeoTeo * G * A * G * A * | XOOOXXXXXXXXXXXOOOX | 1832 |
| 12918 | | A * T * A * C * T * G * | | |
| | | Teom5Ceom5Ceom5Ceo * Teo | | |
| WV- | CACTGAGAATACTGTCCCTT | m5Ceo * Aeom5CeoTeoGeo * A * G * A * A * T | XOOOXXXXXXXXXXXOOOX | 1833 |
| 12919 | | * A * C * T * G * T * m5Ceom5Ceom5CeoTeo * | | |
| | | Teo | | |
| WV- | ACTGAGAATACTGTCCCTTT | Aeo * m5CeoTeoGeoAeo * G * A * A * T * A * | XOOOXXXXXXXXXXXOOOX | 1834 |
| 12920 | | C * T * G * T * C * m5Ceom5CeoTeoTeo * Teo | | |
| WV- | CTGAGAATACTGTCCCTTTT | m5Ceo * TeoGeoAeoGeo * A * A * T * A * C * | XOOOXXXXXXXXXXXOOOX | 1835 |
| 12921 | | T * G * T * C * C * m5CeoTeoTeoTeo * Teo | | |
| WV- | TGAGAATACTGTCCCTTTTA | Teo * GeoAeoGeoAeo * A * T * A * C * T * G * | XOOOXXXXXXXXXXXOOOX | 1836 |
| 12922 | | T * C * C * C * TeoTeoTeoTeo * Aeo | | |
| WV- | GAGAATACTGTCCCTTTTAA | Geo * AeoGeoAeoAeo * T * A * C * T * G * T * | XOOOXXXXXXXXXXXOOOX | 1837 |
| 12923 | | C * C * C * T * TeoTeoTeoAeo * Aeo | | |
| WV- | AGAATACTGTCCCTTTTAAG | Aeo * GeoAeoAeoTeo * A * C * T * G * T * C * | XOOOXXXXXXXXXXXOOOX | 1838 |
| 12924 | | C * C * T * T * TeoTeoAeoAeo * Geo | | |
| WV- | GAATACTGTCCCTTTTAAGC | Geo * AeoAeoTeoAeo * C * T * G * T * C * C * | XOOOXXXXXXXXXXXOOOX | 1839 |
| 12925 | | C * T * T * T * TeoAeoAeoGeo * m5Ceo | | |
| WV- | AATACTGTCCCTTTTAAGCA | Aeo * AeoTeoAeom5Ceo * T * G * T * C * C * C | XOOOXXXXXXXXXXXOOOX | 1840 |
| 12926 | | * T * T * T * T * AeoAeoGeom5Ceo * Aeo | | |
| WV- | ATACTGTCCCTTTTAAGCAA | Aeo * TeoAeom5CeoTeo * G * T * C * C * C * T | XOOOXXXXXXXXXXXOOOX | 1841 |
| 12927 | | * T * T * T * A * AeoGeom5CeoAeo * Aeo | | |
| WV- | TACTGTCCCTTTTAAGCAAC | Teo * Aeom5CeoTeoGeo * T * C * C * C * T * T | XOOOXXXXXXXXXXXOOOX | 1842 |
| 12928 | | * T * T * A * A * Geom5CeoAeoAeo * m5Ceo | | |
| WV- | ACTGTCCCTTTTAAGCAACC | Aeo * m5CeoTeoGeoTeo * C * C * C * T * T * T | XOOOXXXXXXXXXXXOOOX | 1843 |
| 12929 | | * T * A * A * G * m5CeoAeoAeom5Ceo * | | |
| | | m5Ceo | | |
| WV- | CTGTCCCTTTTAAGCAACCT | m5Ceo * TeoGeoTeom5Ceo * C * C * T * T * T | XOOOXXXXXXXXXXXOOOX | 1844 |
| 12930 | | * T * A * A * G * C * AeoAeom5Ceom5Ceo * | | |
| | | Teo | | |
| WV- | TGTCCCTTTTAAGCAACCTA | Teo * GeoTeom5Ceom5Ceo * C * T * T * T * T | XOOOXXXXXXXXXXXOOOX | 1845 |
| 12931 | | * A * A * G * C * A * Aeom5Ceom5CeoTeo * | | |
| | | Aeo | | |
| WV- | GTCCCTTTTAAGCAACCTAC | Geo * Teom5Ceom5Ceom5Ceo * T * T * T * T | XOOOXXXXXXXXXXXOOOX | 1846 |
| 12932 | | * A * A * G * C * A * A * m5Ceom5CeoTeoAeo | | |
| | | * m5Ceo | | |
| WV- | TCCCTTTTAAGCAACCTACA | Teo * m5Ceom5Ceom5CeoTeo * T * T * T * A | XOOOXXXXXXXXXXXOOOX | 1847 |
| 12933 | | * A * G * C * A * A * C * m5CeoTeoAeom5Ceo | | |
| | | * Aeo | | |
| WV- | CCCTTTTAAGCAACCTACAG | m5Ceo * m5Ceom5CeoTeoTeo * T * T * A * A | XOOOXXXXXXXXXXXOOOX | 1848 |
| 12934 | | * G * C * A * A * C * C * TeoAeom5CeoAeo * | | |
| | | Geo | | |
| WV- | CCTTTTAAGCAACCTACAGG | m5Ceo * m5CeoTeoTeoTeo * T * A * A * G * C | XOOOXXXXXXXXXXXOOOX | 1849 |
| 12935 | | * A * A * C * C * T * Aeom5CeoAeoGeo * Geo | | |
| WV- | CTTTTAAGCAACCTACAGGG | m5Ceo * TeoTeoTeoTeo * A * A * G * C * A * A | XOOOXXXXXXXXXXXOOOX | 1850 |
| 12936 | | * C * C * T * A * m5CeoAeoGeoGeo * Geo | | |
| WV- | TTTTAAGCAACCTACAGGGG | Teo * TeoTeoTeoAeo * A * G * C * A * A * C * | XOOOXXXXXXXXXXXOOOX | 1851 |
| 12937 | | C * T * A * C * AeoGeoGeoGeo * Geo | | |
| WV- | TTTAAGCAACCTACAGGGGC | Teo * TeoTeoAeoAeo * G * C * A * A * C * C * | XOOOXXXXXXXXXXXOOOX | 1852 |
| 12938 | | T * A * C * A * GeoGeoGeoGeo * m5Ceo | | |
| WV- | TTAAGCAACCTACAGGGGCA | Teo * TeoAeoAeoGeo * C * A * A * C * C * T * | XOOOXXXXXXXXXXXOOOX | 1853 |
| 12939 | | A * C * A * G * GeoGeoGeom5Ceo * Aeo | | |
| WV- | TAAGCAACCTACAGGGGCAG | Teo * AeoAeoGeom5Ceo * A * A * C * C * T * | XOOOXXXXXXXXXXXOOOX | 1854 |
| 12940 | | A * C * A * G * G * GeoGeom5CeoAeo * Geo | | |
| WV- | AAGCAACCTACAGGGGCAGC | Aeo * AeoGeom5CeoAeo * A * C * C * T * A * | XOOOXXXXXXXXXXXOOOX | 1855 |
| 12941 | | C * A * G * G * G * Geom5CeoAeoGeo * | | |
| | | m5Ceo | | |
| WV- | AGCAACCTACAGGGGCAGCC | Aeo * Geom5CeoAeoAeo * C * C * T * A * C * | XOOOXXXXXXXXXXXOOOX | 1856 |
| 12942 | | A * G * G * G * G * m5CeoAeoGeom5Ceo * | | |
| | | m5Ceo | | |
| WV- | GCAACCTACAGGGGCAGCCC | Geo * m5CeoAeoAeom5Ceo * C * T * A * C * A | XOOOXXXXXXXXXXXOOOX | 1857 |
| 12943 | | * G * G * G * G * C * AeoGeom5Ceom5Ceo * | | |
| | | m5Ceo | | |
| WV- | CAACCTACAGGGGCAGCCCT | m5Ceo * AeoAeom5Ceom5Ceo * T * A * C * A | XOOOXXXXXXXXXXXOOOX | 1858 |
| 12944 | | * G * G * G * G * C * A * | | |
| | | Geom5Ceom5Ceom5Ceo * Teo | | |
| WV- | AACCTACAGGGGCAGCCCTG | Aeo * Aeom5Ceom5CeoTeo * A * C * A * G * | XOOOXXXXXXXXXXXOOOX | 1859 |
| 12945 | | G * G * G * C * A * G * | | |
| | | m5Ceom5Ceom5CeoTeo * Geo | | |
| WV- | ACCTACAGGGGCAGCCCTGG | Aeo * m5Ceom5CeoTeoAeo * C * A * G * G * | XOOOXXXXXXXXXXXOOOX | 1860 |
| 12946 | | G * G * C * A * G * C * m5Ceom5CeoTeoGeo * | | |
| | | Geo | | |
| WV- | GCACTGAGAATACTGUCCCU | Geo * m5CeoAeom5CeoTeo * G * A * G * A * | XOOOXXXXXXXXXXXXXXX | 1861 |
| 12947 | | A * T * A * C * T * G * mU * mC * mC * mC * | | |
| | | mU | | |
| WV- | CACTGAGAATACTGTCCCUU | m5Ceo * Aeom5CeoTeoGeo * A * G * A * A * T | XOOOXXXXXXXXXXXXXXX | 1862 |
| 12948 | | * A * C * T * G * T * mC * mC * mC * mU * mU | | |
| WV- | ACTGAGAATACTGTCCCUUU | Aeo * m5CeoTeoGeoAeo * G * A * A * T * A * | XOOOXXXXXXXXXXXXXXX | 1863 |
| 12949 | | C * T * G * T * C * mC * mC * mU * mU * mU | | |
| WV- | CTGAGAATACTGTCCCUUUU | m5Ceo * TeoGeoAeoGeo * A * A * T * A * C * | XOOOXXXXXXXXXXXXXXX | 1864 |
| 12950 | | T * G * T * C * C * mC * mU * mU * mU * mU | | |
| WV- | TGAGAATACTGTCCCUUUUA | Teo * GeoAeoGeoAeo * A * T * A * C * T * G * | XOOOXXXXXXXXXXXXXXX | 1865 |
| 12951 | | T * C * C * C * mU * mU * mU * mU * mA | | |
| WV- | GAGAATACTGTCCCTUUUAA | Geo * AeoGeoAeoAeo * T * A * C * T * G * T * | XOOOXXXXXXXXXXXXXXX | 1866 |
| 12952 | | C * C * C * T * mU * mU * mU * mA * mA | | |
| WV- | AGAATACTGTCCCTTUUAAG | Aeo * GeoAeoAeoTeo * A * C * T * G * T * C * | XOOOXXXXXXXXXXXXXXX | 1867 |
| 12953 | | C * C * T * T * mU * mU * mA * mA * mG | | |
| WV- | GAATACTGTCCCTTTUAAGC | Geo * AeoAeoTeoAeo * C * T * G * T * C * C * | XOOOXXXXXXXXXXXXXXX | 1868 |
| 12954 | | C * T * T * T * mU * mA * mA * mG * mC | | |
| WV- | AATACTGTCCCTTTTAAGCA | Aeo * AeoTeoAeom5Ceo * T * G * T * C * C * C | XOOOXXXXXXXXXXXXXXX | 1869 |
| 12955 | | * T * T * T * T * mA * mA * mG * mC * mA | | |
| WV- | ATACTGTCCCTTTTAAGCAA | Aeo * TeoAeom5CeoTeo * G * T * C * C * C * T | XOOOXXXXXXXXXXXXXXX | 1870 |
| 12956 | | * T * T * T * A * mA * mG * mC * mA * mA | | |
| WV- | TACTGTCCCTTTTAAGCAAC | Teo * Aeom5CeoTeoGeo * T * C * C * C * T * T | XOOOXXXXXXXXXXXXXXX | 1871 |
| 12957 | | * T * T * A * A * mG * mC * mA * mA * mC | | |
| WV- | ACTGTCCCTTTTAAGCAACC | Aeo * m5CeoTeoGeoTeo * C * C * C * T * T * T | XOOOXXXXXXXXXXXXXXX | 1872 |
| 12958 | | * T * A * A * G * mC * mA * mA * mC * mC | | |
| WV- | CTGTCCCTTTTAAGCAACCU | m5Ceo * TeoGeoTeom5Ceo * C * C * T * T * T | XOOOXXXXXXXXXXXXXXX | 1873 |
| 12959 | | * T * A * A * G * C * mA * mA * mC * mC * mU | | |
| WV- | TGTCCCTTTTAAGCAACCUA | Teo * GeoTeom5Ceom5Ceo * C * T * T * T * T | XOOOXXXXXXXXXXXXXXX | 1874 |
| 12960 | | * A * A * G * C * A * mA * mC * mC * mU * mA | | |
| WV- | GTCCCTTTTAAGCAACCUAC | Geo * Teom5Ceom5Ceom5Ceo * T * T * T * T | XOOOXXXXXXXXXXXXXXX | 1875 |
| 12961 | | * A * A * G * C * A * A * mC * mC * mU * mA * | | |
| | | mC | | |
| WV- | TCCCTTTTAAGCAACCUACA | Teo * m5Ceom5Ceom5CeoTeo * T * T * T * A | XOOOXXXXXXXXXXXXXXX | 1876 |
| 12962 | | * A * G * C * A * A * C * mC * mU * mA * mC * | | |
| | | mA | | |
| WV- | CCCTTTTAAGCAACCUACAG | m5Ceo * m5Ceom5CeoTeoTeo * T * T * A * A | XOOOXXXXXXXXXXXXXXX | 1877 |
| 12963 | | * G * C * A * A * C * C * mU * mA * mC * mA * | | |
| | | mG | | |
| WV- | CCTTTTAAGCAACCTACAGG | m5Ceo * m5CeoTeoTeoTeo * T * A * A * G * C | XOOOXXXXXXXXXXXXXXX | 1878 |
| 12964 | | * A * A * C * C * T * mA * mC * mA * mG * mG | | |
| WV- | CTTTTAAGCAACCTACAGGG | m5Ceo * TeoTeoTeoTeo * A * A * G * C * A * A | XOOOXXXXXXXXXXXXXXX | 1879 |
| 12965 | | * C * C * T * A * mC * mA * mG * mG * mG | | |
| WV- | TTTTAAGCAACCTACAGGGG | Teo * TeoTeoTeoAeo * A * G * C * A * A * C * | XOOOXXXXXXXXXXXXXXX | 1880 |
| 12966 | | C * T * A * C * mA * mG * mG * mG * mG | | |
| WV- | TTTAAGCAACCTACAGGGGC | Teo * TeoTeoAeoAeo * G * C * A * A * C * C * | XOOOXXXXXXXXXXXXXXX | 1881 |
| 12967 | | T * A * C * A * mG * mG * mG * mG * mC | | |
| WV- | TTAAGCAACCTACAGGGGCA | Teo * TeoAeoAeoGeo * C * A * A * C * C * T * | XOOOXXXXXXXXXXXXXXX | 1882 |
| 12968 | | A * C * A * G * mG * mG * mG * mC * mA | | |
| WV- | TAAGCAACCTACAGGGGCAG | Teo * AeoAeoGeom5Ceo * A * A * C * C * T * | XOOOXXXXXXXXXXXXXXX | 1883 |
| 12969 | | A * C * A * G * G * mG * mG * mC * mA * mG | | |
| WV- | AAGCAACCTACAGGGGCAGC | Aeo * AeoGeom5CeoAeo * A * C * C * T * A * | XOOOXXXXXXXXXXXXXXX | 1884 |
| 12970 | | C * A * G * G * G * mG * mC * mA * mG * mC | | |
| WV- | AGCAACCTACAGGGGCAGCC | Aeo * Geom5CeoAeoAeo * C * C * T * A * C * | XOOOXXXXXXXXXXXXXXX | 1885 |
| 12971 | | A * G * G * G * G * mC * mA * mG * mC * mC | | |
| WV- | GCAACCTACAGGGGCAGCCC | Geo * m5CeoAeoAeom5Ceo * C * T * A * C * A | XOOOXXXXXXXXXXXXXXX | 1886 |
| 12972 | | * G * G * G * G * C * mA * mG * mC * mC * | | |
| | | mC | | |
| WV- | CAACCTACAGGGGCAGCCCU | m5Ceo * AeoAeom5Ceom5Ceo * T * A * C * A | XOOOXXXXXXXXXXXXXXX | 1887 |
| 12973 | | * G * G * G * G * C * A * mG * mC * mC * mC * | | |
| | | mU | | |
| WV- | AACCTACAGGGGCAGCCCUG | Aeo * Aeom5Ceom5CeoTeo * A * C * A * G * | XOOOXXXXXXXXXXXXXXX | 1888 |
| 12974 | | G * G * G * C * A * G * mC * mC * mC * mU * | | |
| | | mG | | |
| WV- | ACCTACAGGGGCAGCCCUGG | Aeo * m5Ceom5CeoTeoAeo * C * A * G * G * | XOOOXXXXXXXXXXXXXXX | 1889 |
| 12975 | | G * G * C * A * G * C * mC * mC * mU * mG * | | |
| | | mG | | |
| WV- | AGCTTCTTGTCCAGCUUUAU | Aeo * Geom5CeoTeoTeo * C * T * T * G * T * C | XOOOXXXXXXXXXXXXXXX | 1890 |
| 12976 | | * C * A * G * C * mU * mU * mU * mA * mU | | |
| WV- | GCACUGAGAATACTGTCCCT | mG * mC * mA * mC * mU * G * A * G * A * A | XXXXXXXXXXXXXXXOOOX | 1891 |
| 12977 | | * T * A * C * T * G * Teom5Ceom5Ceom5Ceo * | | |
| | | Teo | | |
| WV- | CACUGAGAATACTGTCCCTT | mC * mA * mC * mU * mG * A * G * A * A * T * | XXXXXXXXXXXXXXXOOOX | 1892 |
| 12978 | | A * C * T * G * T * m5Ceom5Ceom5CeoTeo * | | |
| | | Teo | | |
| WV- | ACUGAGAATACTGTCCCTTT | mA * mC * mU * mG * mA * G * A * A * T * A | XXXXXXXXXXXXXXXOOOX | 1893 |
| 12979 | | * C * T * G * T * C * m5Ceom5CeoTeoTeo * | | |
| | | Teo | | |
| WV- | CUGAGAATACTGTCCCTTTT | mC * mU * mG * mA * mG * A * A * T * A * C * | XXXXXXXXXXXXXXXOOOX | 1894 |
| 12980 | | T * G * T * C * C * m5CeoTeoTeoTeo * Teo | | |
| WV- | UGAGAATACTGTCCCTTTTA | mU * mG * mA * mG * mA * A * T * A * C * T * | XXXXXXXXXXXXXXXOOOX | 1895 |
| 12981 | | G * T * C * C * C * TeoTeoTeoTeo * Aeo | | |
| WV- | GAGAATACTGTCCCTTTTAA | mG * mA * mG * mA * mA * T * A * C * T * G * | XXXXXXXXXXXXXXXOOOX | 1896 |
| 12982 | | T * C * C * C * T * TeoTeoTeoAeo * Aeo | | |
| WV- | AGAAUACTGTCCCTTTTAAG | mA * mG * mA * mA * mU * A * C * T * G * T * | XXXXXXXXXXXXXXXOOOX | 1897 |
| 12983 | | C * C * C * T * T * TeoTeoAeoAeo * Geo | | |
| WV- | GAAUACTGTCCCTTTTAAGC | mG * mA * mA * mU * mA * C * T * G * T * C * | XXXXXXXXXXXXXXXOOOX | 1898 |
| 12984 | | C * C * T * T * T * TeoAeoAeoGeo * m5Ceo | | |
| WV- | AAUACTGTCCCTTTTAAGCA | mA * mA * mU * mA * mC * T * G * T * C * C * | XXXXXXXXXXXXXXXOOOX | 1899 |
| 12985 | | C * T * T * T * T * AeoAeoGeom5Ceo * Aeo | | |
| WV- | AUACUGTCCCTTTTAAGCAA | mA * mU * mA * mC * mU * G * T * C * C * C * | XXXXXXXXXXXXXXXOOOX | 1900 |
| 12986 | | T * T * T * T * A * AeoGeom5CeoAeo * Aeo | | |
| WV- | UACUGTCCCTTTTAAGCAAC | mU * mA * mC * mU * mG * T * C * C * C * T * | XXXXXXXXXXXXXXXOOOX | 1901 |
| 12987 | | T * T * T * A * A * Geom5CeoAeoAeo * m5Ceo | | |
| WV- | ACUGUCCCTTTTAAGCAACC | mA * mC * mU * mG * mU * C * C * C * T * T * | XXXXXXXXXXXXXXXOOOX | 1902 |
| 12988 | | T * T * A * A * G * m5CeoAeoAeom5Ceo * | | |
| | | m5Ceo | | |
| WV- | CUGUCCCTTTTAAGCAACCT | mC * mU * mG * mU * mC * C * C * T * T * T * | XXXXXXXXXXXXXXXOOOX | 1903 |
| 12989 | | T * A * A * G * C * AeoAeom5Ceom5Ceo * Teo | | |
| WV- | UGUCCCTTTTAAGCAACCTA | mU * mG * mU * mC * mC * C * T * T * T * T * | XXXXXXXXXXXXXXXOOOX | 1904 |
| 12990 | | A * A * G * C * A * Aeom5Ceom5CeoTeo * Aeo | | |
| WV- | GUCCCTTTTAAGCAACCTAC | mG * mU * mC * mC * mC * T * T * T * T * A * | XXXXXXXXXXXXXXXOOOX | 1905 |
| 12991 | | A * G * C * A * A * m5Ceom5CeoTeoAeo * | | |
| | | m5Ceo | | |
| WV- | UCCCUTTTAAGCAACCTACA | mU * mC * mC * mC * mU * T * T * T * A * A * | XXXXXXXXXXXXXXXOOOX | 1906 |
| 12992 | | G * C * A * A * C * m5CeoTeoAeom5Ceo * Aeo | | |
| WV- | CCCUUTTAAGCAACCTACAG | mC * mC * mC * mU * mU * T * T * A * A * G * | XXXXXXXXXXXXXXXOOOX | 1907 |
| 12993 | | C * A * A * C * C * TeoAeom5CeoAeo * Geo | | |
| WV- | CCUUUTAAGCAACCTACAGG | mC * mC * mU * mU * mU * T * A * A * G * C | XXXXXXXXXXXXXXXOOOX | 1908 |
| 12994 | | * A * A * C * C * T * Aeom5CeoAeoGeo * Geo | | |
| WV- | CUUUUAAGCAACCTACAGGG | mC * mU * mU * mU * mU * A * A * G * C * A | XXXXXXXXXXXXXXXOOOX | 1909 |
| 12995 | | * A * C * C * T * A * m5CeoAeoGeoGeo * Geo | | |
| WV- | UUUUAAGCAACCTACAGGGG | mU * mU * mU * mU * mA * A * G * C * A * A | XXXXXXXXXXXXXXXOOOX | 1910 |
| 12996 | | * C * C * T * A * C * AeoGeoGeoGeo * Geo | | |
| WV- | UUUAAGCAACCTACAGGGGC | mU * mU * mU * mA * mA * G * C * A * A * C | XXXXXXXXXXXXXXXOOOX | 1911 |
| 12997 | | * C * T * A * C * A * GeoGeoGeoGeo * m5Ceo | | |
| WV- | UUAAGCAACCTACAGGGGCA | mU * mU * mA * mA * mG * C * A * A * C * C | XXXXXXXXXXXXXXXOOOX | 1912 |
| 12998 | | * T * A * C * A * G * GeoGeoGeom5Ceo * Aeo | | |
| WV- | UAAGCAACCTACAGGGGCAG | mU * mA * mA * mG * mC * A * A * C * C * T * | XXXXXXXXXXXXXXXOOOX | 1913 |
| 12999 | | A * C * A * G * G * GeoGeom5CeoAeo * Geo | | |
| WV- | AAGCAACCTACAGGGGCAGC | mA * mA * mG * mC * mA * A * C * C * T * A * | XXXXXXXXXXXXXXXOOOX | 1914 |
| 13000 | | C * A * G * G * G * Geom5CeoAeoGeo * | | |
| | | m5Ceo | | |
| WV- | AGCAACCTACAGGGGCAGCC | mA * mG * mC * mA * mA * C * C * T * A * C * | XXXXXXXXXXXXXXXOOOX | 1915 |
| 13001 | | A * G * G * G * G * m5CeoAeoGeom5Ceo * | | |
| | | m5Ceo | | |
| WV- | GCAACCTACAGGGGCAGCCC | mG * mC * mA * mA * mC * C * T * A * C * A * | XXXXXXXXXXXXXXXOOOX | 1916 |
| 13002 | | G * G * G * G * C * AeoGeom5Ceom5Ceo * | | |
| | | m5Ceo | | |
| WV- | CAACCTACAGGGGCAGCCCT | mC * mA * mA * mC * mC * T * A * C * A * G * | XXXXXXXXXXXXXXXOOOX | 1917 |
| 13003 | | G * G * G * C * A * Geom5Ceom5Ceom5Ceo * | | |
| | | Teo | | |
| WV- | AACCUACAGGGGCAGCCCTG | mA * mA * mC * mC * mU * A * C * A * G * G | XXXXXXXXXXXXXXXOOOX | 1918 |
| 13004 | | * G * G * C * A * G * m5Ceom5Ceom5CeoTeo | | |
| | | * Geo | | |
| WV- | ACCUACAGGGGCAGCCCTGG | mA * mC * mC * mU * mA * C * A * G * G * G | XXXXXXXXXXXXXXXOOOX | 1919 |
| 13005 | | * G * C * A * G * C * m5Ceom5CeoTeoGeo * | | |
| | | Geo | | |
| WV- | CUUGUCCAGCTTTATTGGGA | mC * mU * mU * mG * mU * C * C * A * G * C | XXXXXXXXXXXXXXXOOOX | 1920 |
| 13006 | | * T * T * T * A * T * TeoGeoGeoGeo * Aeo | | |
| WV- | AGCUUCTTGTCCAGCTTTAT | mA * mG * mC * mU * mU * C * T * T * G * T * | XXXXXXXXXXXXXXXOOOX | 1921 |
| 13007 | | C * C * A * G * C * TeoTeoTeoAeo * Teo | | |
| WV- | AUAGCAGCTTCTTGTCCAGC | mA * mU * mA * mG * mC * A * G * C * T * T * | XXXXXXXXXXXXXXXOOOX | 1922 |
| 13008 | | C * T * T * G * T * m5Ceom5CeoAeoGeo * | | |
| | | m5Ceo | | |
| WV- | CGGCCTCTGAA GCTCGGGCA | C * G * G * C * C * T * C * T * G * A * A * G * C | XXXXXXXXXX XXXXXXXXX | 1923 |
| 730 | | * T * C * G * G * G * C * A | | |
| WV- | TAGCUUCUUGU | POT * fA * mGfC * mUfU * mCfU * mUfG * | XXOXOXOXOXO | 1924 |
| 2420 | CCAGCUUUUU | mUfC * mCfA * mG * fC * mU * fU * mU * | XOXXXXXXO | |
| | | mUmU | | |
| WV- | TCACUGAGAAUAC | 5mpdT * SfC * SmAmC * SmU * SmG * | SSOSSSOSOSSSS SSSS SSSS | 1925 |
| 13570 | UGUCCCUUTU | SmAmG * SmAmA * SmU * SmA * SmC * | S | |
| | | SfU * SmG * SmU * SmC * SmC * SmC * | | |
| | | SmU * SmU * STGaNC6T * SmU | | |
| WV- | TCACUGAGAAUAC | 5mrpdT * SfC * SmAmC * SmU * SmG * | SSOSSSOSOSSSS SSSS SSSS | 1926 |
| 13571 | UGUCCCUUTU | SmAmG * SmAmA * SmU * SmA * SmC * | S | |
| | | SfU * SmG * SmU * SmC * SmC * SmC * | | |
| | | SmU * SmU * STGaNC6T * SmU | | |
| WV- | TCACUGAGAAUAC | 5mspdT * SfC * SmAmC * SmU * SmG * | SSOSSSOSOSSSS SSSS SSSS | 1927 |
| 13572 | UGUCCCUUTU | SmAmG * SmAmA * SmU * SmA * SmC * | S | |
| | | SfU * SmG * SmU * SmC * SmC * SmC * | | |
| | | SmU * SmU * STGaNC6T * SmU | | |
| WV- | TCACUGAGAAUAC | 5mpdT * SfC * SmAmC * SmU * SmG * | SSOSSSOSOSSSS SSSS SSSS | 1928 |
| 13573 | UGUCCCUUTU | SmAmG * SmAmA * SmU * SmA * SmC * | S | |
| | | SfU * SmG * SmU * SmC * SmC * SmC * | | |
| | | SmU * SmU * SAMC6T * SmU | | |
| WV- | TCACUGAGAAUAC | 5mrpdT * SfC * SmAmC * SmU * SmG * | SSOSSSOSOSSSS SSSS SSSS | 1929 |
| 13574 | UGUCCCUUTU | SmAmG * SmAmA * SmU * SmA * SmC * | S | |
| | | SfU * SmG * SmU * SmC * SmC * SmC * | | |
| | | SmU * SmU * SAMC6T * SmU | | |
| WV- | TCACUGAGAAUAC | 5mspdT * SfC * SmAmC * SmU * SmG * | SSOSSSOSOSSSS SSSS SSSS | 1930 |
| 13575 | UGUCCCUUTU | SmAmG * SmAmA * SmU * SmA * SmC * | S | |
| | | SfU * SmG * SmU * SmC * SmC * SmC * | | |
| | | SmU * SmU * SAMC6T * SmU | | |
| WV- | TCACUGAGAAUAC | 5mvpdT * SfC * SmAmC * SmU * SmG * | SSOSSSOSOSSSS SSSS SSSS | 1931 |
| 13576 | UGUCCCUUTU | SmAmG * SmAmA * SmU * SmA * SmC * | S | |
| | | SfU * SmG * SmU * SmC * SmC * SmC * | | |
| | | SmU * SmU * STGaNC6T * SmU | | |
| WV- | TCACUGAGAAUAC | 5mvpdT * SfC * SmAmC * SmU * SmG * | SSOSSSOSOSSSS SSSS SSSS | 1932 |
| 13577 | UGUCCCUUTU | SmAmG * SmAmA * SmU * SmA * SmC * | S | |
| | | SfU * SmG * SmU * SmC * SmC * SmC * | | |
| | | SmU * SmU * SAMC6T * SmU | | |
| WV- | TCACUGAGAAUAC | 5ptzdT * SfC * SmAmC * SmU * SmG * | SSOSSSOSOSSSS SSSS SSSS | 1933 |
| 13578 | UGUCCCUUTU | SmAmG * SmAmA * SmU * SmA * SmC * | S | |
| | | SfU * SmG * SmU * SmC * SmC * SmC * | | |
| | | SmU * SmU * STGaNC6T * SmU | | |
| WV- | TCACUGAGAAUAC | 5ptzdT * SfC * SmAmC * SmU * SmG * | SSOSSSOSOSSSS SSSS SSSS | 1934 |
| 13579 | UGUCCCUUTU | SmAmG * SmAmA * SmU * SmA * SmC * | S | |
| | | SfU * SmG * SmU * SmC * SmC * SmC * | | |
| | | SmU * SmU * SAMC6T * SmU | | |
| WV- | TCACUGAGAAUAC | VPT * SfC * SmAmC * SmU * SmG * | SSOSSSOSOSSSS SSSS SSS | 1935 |
| 13580 | UGUCCCTU | SmAmG * SmAmA * SmU * SmA * SmC * | | |
| | | SfU * SmG * SmU * SmC * SmC * SmC * | | |
| | | STGaNC6T * SmU | | |
| WV- | TCACUGAGAAUAC | 5mpdT * SfC * SmAmC * SmU * SmG * | SSOSSSOSOSSSS SSSS SSS | 1936 |
| 13581 | UGUCCCTU | SmAmG * SmAmA * SmU * SmA * SmC * | | |
| | | SfU * SmG * SmU * SmC * SmC * SmC * | | |
| | | STGaNC6T * SmU | | |
| WV- | TCACUGAGAAUAC | 5mrpdT * SfC * SmAmC * SmU * SmG * | SSOSSSOSOSSSS SSSS SSS | 1937 |
| 13582 | UGUCCCTU | SmAmG * SmAmA * SmU * SmA * SmC * | | |
| | | SfU * SmG * SmU * SmC * SmC * SmC * | | |
| | | STGaNC6T * SmU | | |
| WV- | TCACUGAGAAUAC | 5mspdT * SfC * SmAmC * SmU * SmG * | SSOSSSOSOSSSS SSSS SSS | 1938 |
| 13583 | UGUCCCTU | SmAmG * SmAmA * SmU * SmA * SmC * | | |
| | | SfU * SmG * SmU * SmC * SmC * SmC * | | |
| | | STGaNC6T * SmU | | |
| WV- | TCACUGAGAAUAC | VPT * SfC * SmAmC * SmU * SmG * | SSOSSSOSOSSSS SSSS SSS | 1939 |
| 13584 | UGUCCCTU | SmAmG * SmAmA * SmU * SmA * SmC * | | |
| | | SfU * SmG * SmU * SmC * SmC * SmC * | | |
| | | SAMC6T * SmU | | |
| WV- | TCACUGAGAAUAC | 5mpdT * SfC * SmAmC * SmU * SmG * | SSOSSSOSOSSSS SSSS SSS | 1940 |
| 13585 | UGUCCCTU | SmAmG * SmAmA * SmU * SmA * SmC * | | |
| | | SfU * SmG * SmU * SmC * SmC * SmC * | | |
| | | SAMC6T * SmU | | |
| WV- | TCACUGAGAAUAC | 5mrpdT * SfC * SmAmC * SmU * SmG * | SSOSSSOSOSSSS SSSS SSS | 1941 |
| 13586 | UGUCCCTU | SmAmG * SmAmA * SmU * SmA * SmC * | | |
| | | SfU * SmG * SmU * SmC * SmC * SmC * | | |
| | | SAMC6T * SmU | | |
| WV- | TCACUGAGAAU | 5mspdT * SfC * SmAmC * SmU * SmG * | SSOSSSOSO SSSS SSSS SSS | 1942 |
| 13587 | ACUGUCCCTU | SmAmG * SmAmA * SmU * SmA * SmC * SfU * | | |
| | | SmG * SmU * SmC * SmC * SmC * SAMC6T * | | |
| | | SmU | | |

The disclosure notes that some sequences, due to their length, are divided into multiple lines; however, these sequences, as are all oligonucleotides in Table 1A, are single-stranded (unless otherwise noted).
Moieties and Modifications Listed in the Tables (or Compounds Used to Construct Oligonucleotides Comprising these Moieties or Modifications:

| | |
|---|---|
| IT | [chemical structure] if between 5′-end groups and/or internucleotidic linkages (e.g., in WV-3819); |
| | [chemical structure] if at 5′-end and without 5′-end groups (e.g., in WV-3818); |
| | [chemical structure] if at 3′-end (e.g., in WV-7821). |
| IG | [chemical structure] if between 5′-end groups and/or internucleotidic linkages (e.g., in WV-6689); |
| | [chemical structure] if at 5′-end and without 5′-end groups (e.g., in WV-6711); |
| | [chemical structure] if at 3′-end (e.g., in WV-7827). |
| IA | [chemical structure] if between 5′-end groups and/or internucleotidic linkages (e.g., in WV-6692); |
| | [chemical structure] if at 5′-end and without 5′-end groups (e.g., in WV-6710); |
| | [chemical structure] if at 3′-end (e.g., in WV-7817). |
| Im5C | [chemical structure] if between 5′-end groups and/or intemucleotidic linkages (e.g., in WV-6690); |
| | [chemical structure] if at 5′-end and without 5′-end groups (e.g., in WV-7817); |
| | [chemical structure] if at 3′-end (e.g., in WV-7818). |
| MeOT | [chemical structure] |
| Mod001 | [chemical structure] |
| Mod022 | CH₃CH₂CH₂—; connected to 5′-end of oligonucleotide chain through either a phosphate |
| | linkage (O or PO) or phosphorothioate linkage (* if the phosphorothioate not chirally |
| | controlled; can also be Sp if chirally controlled and has an Sp configuration, and Rp if |
| | chirally controlled and has an Rp configuration) as illustrated. |
| | [chemical structure] |
| Mod023 | [chemical structure] connected to 5′-end of oligonucleotide chain through either a phosphate linkage (O or PO) or phosphorothioate linkage (* if the phosphorothioate not chirally controlled; can also be Sp if chirally controlled and has an Sp configuration, and Rp if chirally controlled and has an Rp configuration) as illustrated. |
| | [chemical structure] |
| Mod034 | [chemical structure] |
| Mod035 | [chemical structure] |
| Mod036 | [chemical structure] |
| Mod038 | [chemical structure] |
| Mod039 | [chemical structure] |
| Mod040 | [chemical structure] |
| Mod041 | [chemical structure] |
| Mod079 | [chemical structure] |
| Mod080 | [chemical structure] |
| Mod081 | [chemical structure] |
| Mod082 | [chemical structure] |
| Mod083 | [chemical structure] |
| 5mp | [chemical structure] |
| 5MR | [chemical structure] |
| 5mrp | [chemical structure] |
| 5MS | [chemical structure] |
| 5msp | [chemical structure] |
| 5mvp | [chemical structure] |
| 5pacet | [chemical structure] |
| 5ptz | [chemical structure] |
| 5tz | [chemical structure] |
| 5tzpo | [chemical structure] |
| 5mpdT | [chemical structure] |
| 5MRdT | [chemical structure] |
| 5mrpdT | [chemical structure] |
| 5MSdT | [chemical structure] |
| 5mspdT | [chemical structure] |
| 5mvpdT | [chemical structure] |
| 5pacetdT | [chemical structure] |
| 5ptzdT | [chemical structure] |
| 5tzdT | [chemical structure] |
| 5tzpodT | [chemical structure] |
| tbclc6T | [chemical structure] |
| bbclc6T | [chemical structure] |
| L009 | —CH₂CH₂CH₂—. When L009 is present at the 5′-end of an oligonucleotide |
| | without a Mod, one end of L009 is connected to —OH and the other end connected |
| | to a 5′-carbon of the oligonucleotide chain via an linkage as indicated (e.g., in |
| | WV-9261, via a stereorandom phosphorothioate linkage (“*”)). |

In some embodiments, a linker, e.g., L009, L010, etc., can replace a sugar, and is bonded on either end to an internucleotidic linkage. For example:
WV-9266 comprises . . . * mAL009*mUfG* . . . , which represents, from 5′ to 3′, a phosphorothioate (*), a sugar which is 2′-OMe (m) attached to a base (A), a phosphodiester linkage (not indicated), a L009 linker (L009), a phosphorothioate (*), a sugar which is 2′-OMe attached to a base which is U (mU), a phosphodiester linkage (not indicated), a sugar which is 2′-F (f) attached to a base (G) and a phosphorothioate.
WV-9267 comprises . . . * mAfC * L009fG* . . . , which represents, from 5′ to 3′, a phosphorothioate (*), a sugar which is 2′-OMe (m) attached to a base (A), a phosphodiester (not indicated), a sugar which is 2′-F (f) attached to a base (C), a phosphorothioate, a L009 linker (L009), a phosphodiester linkage (not indicated), a sugar which is 2′-F (f) attached to a base (G), and a phosphorothioate.

| | |
|---|---|
| L010 | [chemical structure] L010 is connected in the same fashion as typically in DNA (the 5′-carbon of a first sugar is connected to a 3′-carbon of a second sugar via an internucleotidic linkage, and the 3′- carbon of the first sugar is connected to the 5′-carbon of a third sugar via an internucleotidic linkage). When L010 is present at the 5′-end of an oligonucleotide without a Mod, the 5′-carbon of L010 is connected to —OH and the 3'-carbon connected to a 5'-carbon of the oligonucleotide chain via a linkage as indicated (e.g., in WV-9250, via a stereorandom phosphorothioate linkage (“*”)). |

In some oligonucleotides, L010 replaces a sugar bound to a base, and L010 is bond on either end to an internucleotidic linkage.

| | |
|---|---|
| n001, nX | |
| VPT | |
| VP | [chemical structure] |
| VQ | [chemical structure] |
| VR | [chemical structure] |
| VS | [chemical structure] |
| VT | [chemical structure] |

### Additional Abbreviations

[chemical structure]

L001: —NH—(CH₂)₆-linker (C6 linker, C6 amine linker or C6 amino linker), connected to Mod, if any (if no Mod, —H, e.g., in WV-8240), through —NH—, and the 5′-end (e.g., in WV-2406) or 3′-end of oligonucleotide chain through either a phosphate linkage (0 or PO) or phosphorothioate linkage (* if the phosphorothioate not chirally controlled; can also be Sp if chirally controlled and has an Sp configuration, and Rp if chirally controlled and has an Rp configuration) as illustrated. For example, in WV-2406, L001 is connected to Mod001 through —NH— (forming an amide group —C(O)—NH—), and is connected to the oligonucleotide chain through a phosphate linkage (OXXXXXXXXXXXXXXXXXXX); in WV-2422, L001 is not connected to any Mod, but —H, through —NH—, and is connected to the oligonucleotide chain through a phosphate linkage (OXXXXXXXXXXXXXXXXXXX)

### L003:

[chemical structure]

linker, connected to Mod, if any (if no Mod, —H, e.g., in WV-2426), through its amino group, and the 5′-end (e.g., in WV-2407) or 3′-end (e.g., in WV-8070) of oligonucleotide chain through either a phosphate linkage (0 or PO) or phosphorothioate linkage (* if the phosphorothioate not chirally controlled; can also be Sp if chirally controlled and has an Sp configuration, and Rp if chirally controlled and has an Rp configuration) as illustrated. For example, in WV-2407, L003 is connected to Mod001 through its amino group (forming an amide group

[chemical structure]

and is connected to the 5′-end of oligonucleotide chain through a phosphate linkage (OXXXXXXXXXXXXXXXXXXX); in WV-2426, L001 is not connected to any Mod, but —H, through —NH—, and is connected to the oligonucleotide chain through a phosphate linkage (OXXXXXXXXXXXXXXXXXXX); in WV-8070, L003 is connected to Mod001 through its amino group (forming an amide group

[chemical structure]

and is connected to the 3′-end of oligonucleotide chain through a phosphate linkage ( . . . XXXXXXXXXXXXXXXXXXXO)

### m: 2′-OMe

[0429] m5: methyl at 5-position of C (nucleobase is 5-methylcytosine)
m5Ceo: 5-methyl 2′-methoxyethyl C

### OMe: 2′-OMe

[0430] O, PO: phoshodiester (phosphate); can be an end group (typically “PO”; for example in WV-4260: POT*fC* . . . ), or a linkage, e.g., a linkage
between linker and oligonucleotide chain, an internucleotidic linkage, etc.
*, PS: Phosphorothioate; can be an end group (typically “PS”, for example, in WV-2653: PST*fA* . . . ), or a linkage, e.g., a linkage between
linker and oligonucleotide chain, an internucleotidic linkage, etc.
R, Rp: Phosphorothioate in Rp conformation
S, Sp: Phosphorothioate in Sp conformation
X: Stereorandom phosphorothioate

[0431] In some embodiments, a provided oligonucleotide composition is a single-stranded RNAi agent listed in Table 1A or otherwise described herein. In some embodiments, example properties of provided oligonucleotides were demonstrated.

[0432] In some embodiments, a provided oligonucleotide has a structure of any of formats illustrated in FIG. 1.

[0433] The present disclosure presents many non-limiting examples of oligonucleotides capable of mediating single-stranded RNA interference (e.g., single-stranded RNAi agents). Experimental data (not shown) demonstrated that various putative single-stranded RNAi agents were, in fact, capable of mediating RNA interference. In some experiments, an in vitro Ago-2 assay was used, including the use of a RNA test substrate WV-2372 (APOC3). The band representing the RNA test substrate is absent in the presence of oligonucleotides WV-1308 and WV-2420, indicating that these oligonucleotides are single-stranded RNAi agents capable of mediating RNA interference. The remaining lanes are controls: Substrate in the absence of negative control ASO WV-2134; substrate in the presence of negative control ASO WV-2134, which does not mediate RNA interference; substrate in the absence of test oligonucleotide WV-1308; substrate in the absence of test oligonucleotide WV-2420; substrate alone; no substrate, with added WV-2134; and no substrate, with added WV-1308. Also performed (data not shown) was an in vitro Ago-2 assay, using an APOC3 mRNA as a test substrate in a 3′ RACE assay in Hep3B cells. A cleavage product of the APOC3 mRNA in the presence of test oligonucleotide WV-3021 was detected, the product corresponding to cleavage of the mRNA at a site corresponding to a cut between positions 10 and 11 of WV-3021. An artifactual cleavage product was also detected. Experimental data (not shown) demonstrated that dual mechanism oligonucleotide WV-2111 is capable of mediating knockdown by both RNase H and RNA interference. In an experiment, several oligonucleotides were capable of mediating RNA interference. The RNA test substrate was WV-2372. The experiment showed disappearance of the RNA test substrate in the presence of test oligonucleotides WV-1308; WV-2114; WV-2386; and WV-2387, indicating that all these oligonucleotides are capable of acting as single-stranded RNAi agents mediating RNA interference. The remaining lanes are controls. Thus, the experiment showed that oligonucleotides WV-1308, WV-2114, WV-2386, and WV-2387 were all able to mediate RNA interference. Thus, the experiments showed that several single-stranded RNAi agents (e.g., WV-1308, WV-2420, WV-3021, WV-2111, WV-2114, WV-2386, and WV-2387) are capable of mediating RNA interference. The present disclosure presents many non-limiting examples of oligonucleotides, having any of various sequences, formats, modifications, 5′-end regions, seed regions, post-seed regions, and 3′-end regions, and which are capable of mediating single-stranded RNA interference (e.g., single-stranded RNAi agents).

[0434] Formats of Oligonucleotides

[0435] In some embodiments, provided oligonucleotides are capable of directing a decrease in the expression and/or level of a target gene or its gene product. In some embodiments, provided oligonucleotides are capable of directing a decrease in the expression and/or level of a target gene or its gene product via RNA interference. In some embodiments, provided oligonucleotides are capable of directing a decrease in the expression and/or level of a target gene or its gene product via a biochemical mechanism which does not involve RNA interference or RISC (including, but not limited to, RNaseH-mediated knockdown or steric hindrance of gene expression). In some embodiments, provided oligonucleotides are capable of directing a decrease in the expression and/or level of a target gene or its gene product via RNA interference and/or RNase H-mediated knockdown. In some embodiments, provided oligonucleotides are capable of directing a decrease in the expression and/or level of a target gene or its gene product by sterically blocking translation after annealing to a target gene mRNA, and/or by altering or interfering with mRNA splicing and/or exon inclusion or exclusion. In some embodiments, provided oligonucleotides can have any format or portion thereof or structural element thereof described herein or known in the art.

[0436] In some embodiments, an APOC3 oligonucleotide can have any format or structural element thereof described herein or known in the art.

[0437] In some embodiments, an APOC3 oligonucleotide capable of directing a decrease in the expression and/or level of a target gene or its gene product can have any format or structural element thereof described herein or known in the art.

[0438] In some embodiments, an APOC3 oligonucleotide, an APOC3 oligonucleotide that directs RNA interference, an APOC3 oligonucleotide that directs RNase H-mediated knockdown, or an APOC3 oligonucleotide that directs both RNA interference and RNase H-mediated knockdown can have any format or structural element thereof described herein or known in the art.

[0439] Additional non-limiting examples of various ssRNAi formats are embodied by various single-stranded RNAi agents described herein.

[0440] In some embodiments, a provided single-stranded RNAi comprises a 5′-end represented by any 5′-end of any single-stranded RNAi format depicted in FIG. 1 or any single-stranded RNAi agent or single-stranded RNAi format described herein.

[0441] In some embodiments, a provided single-stranded RNAi comprises a 5′-end structure or 5′-end region represented by any 5′-end structure or 5′-end region of any single-stranded RNAi format depicted in FIG. 1 or any single-stranded RNAi agent or single-stranded RNAi format described herein.

[0442] In some embodiments, a provided single-stranded RNAi comprises a 5′-nucleotide represented by any 5′-nucleotide of any single-stranded RNAi format depicted in FIG. 1 or any single-stranded RNAi agent or single-stranded RNAi format described herein.

[0443] In some embodiments, a provided single-stranded RNAi comprises a 5′-nucleoside represented by any 5′-nucleoside of any single-stranded RNAi format depicted in FIG. 1 or any single-stranded RNAi agent or single-stranded RNAi format described herein.

[0444] In some embodiments, a provided single-stranded RNAi comprises a seed region represented by any seed region of any single-stranded RNAi format depicted in FIG. 1 or any single-stranded RNAi agent or single-stranded RNAi format described herein.

[0445] In some embodiments, a provided single-stranded RNAi comprises a post-seed region represented by any post-seed region of any single-stranded RNAi format depicted in FIG. 1 or any single-stranded RNAi agent or single-stranded RNAi format described herein.

[0446] In some embodiments, a provided single-stranded RNAi comprises a post-seed region or component thereof represented by any post-seed region or component thereof of any single-stranded RNAi format depicted in FIG. 1 or any single-stranded RNAi agent or single-stranded RNAi format described herein.

[0447] In some embodiments, a provided single-stranded RNAi comprises a 3′-terminal dinucleotide represented by any 3′-terminal dinucleotide of any single-stranded RNAi format depicted in FIG. 1 or any single-stranded RNAi agent or single-stranded RNAi format described herein.

[0448] In some embodiments, a provided single-stranded RNAi comprises a seed region having a pattern of internucleotidic linkages represented by the pattern of internucleotidic linkages of any seed region of any single-stranded RNAi format depicted in FIG. 1 or any single-stranded RNAi agent or single-stranded RNAi format described herein.

[0449] In some embodiments, a provided single-stranded RNAi comprises a post-seed region having a pattern of internucleotidic linkages represented by the pattern of internucleotidic linkages of any post-seed region of any single-stranded RNAi format depicted in FIG. 1 or any single-stranded RNAi agent or single-stranded RNAi format described herein.

[0450] In some embodiments, a provided single-stranded RNAi comprises a post-seed region or component thereof having a pattern of internucleotidic linkages represented by the pattern of internucleotidic linkages of any post-seed region or component thereof of any single-stranded RNAi format depicted in FIG. 1 or any single-stranded RNAi agent or single-stranded RNAi format described herein.

[0451] In some embodiments, a provided single-stranded RNAi comprises a 3′-terminal dinucleotide having a pattern of internucleotidic linkages represented by the pattern of internucleotidic linkages of any 3′-terminal dinucleotide of any single-stranded RNAi format depicted in FIG. 1 or any single-stranded RNAi agent or single-stranded RNAi format described herein.

[0452] In some embodiments, a provided single-stranded RNAi comprises a seed region having a pattern of chemical modifications represented by the pattern of chemical modifications of any seed region of any single-stranded RNAi format depicted in FIG. 1 or any single-stranded RNAi agent or single-stranded RNAi format described herein.

[0453] In some embodiments, a provided single-stranded RNAi comprises a post-seed region having a pattern of chemical modifications represented by the pattern of chemical modifications of any post-seed region of any single-stranded RNAi format depicted in FIG. 1 or any single-stranded RNAi agent or single-stranded RNAi format described herein.

[0454] In some embodiments, a provided single-stranded RNAi comprises a post-seed region or component thereof having a pattern of chemical modifications represented by the pattern of chemical modifications of any post-seed region or component thereof of any single-stranded RNAi format depicted in FIG. 1 or any single-stranded RNAi agent or single-stranded RNAi format described herein.

[0455] In some embodiments, a provided single-stranded RNAi comprises a 3′-terminal dinucleotide having a pattern of chemical modifications represented by the pattern of chemical modifications of any 3′-terminal dinucleotide of any single-stranded RNAi format depicted in FIG. 1 or any single-stranded RNAi agent or single-stranded RNAi format described herein.

[0456] In some embodiments, a provided single-stranded RNAi comprises a chemical modification represented by any chemical modification of any single-stranded RNAi format depicted in FIG. 1 or any single-stranded RNAi agent or single-stranded RNAi format described herein.

[0457] In some embodiments, a provided single-stranded RNAi comprises a chemical modification represented by any chemical modification of any single-stranded RNAi format depicted in

[0458] FIG. 1 or described herein, wherein the chemical modification is conjugation of a moiety comprising a phosphate, linker, or a targeting moiety.

[0459] In some embodiments, a provided single-stranded RNAi comprises a chemical modification represented by any chemical modification of any single-stranded RNAi format depicted in FIG. 1 or described herein, wherein the chemical modification is conjugation of a moiety comprising a phosphate, linker, or a targeting moiety, wherein the targeting moiety comprises a GalNAc moiety. In some embodiments, a GalNAc is a protected or de-protected GalNAc.

[0460] In some embodiments, an APOC3 oligonucleotide is capable of decreasing the expression, activity and/or level of a target gene and/or a gene product thereof and has the format of any oligonucleotide described herein. In some embodiments, an APOC3 oligonucleotide is capable of decreasing the expression, activity and/or level of a target gene and/or a gene product thereof via a RNaseH-mediated mechanism or mechanism related to steric hindrance of translation and has the format of any oligonucleotide described herein. In some embodiments, an APOC3 oligonucleotide is capable of decreasing the expression, activity and/or level of a target gene and/or a gene product thereof via a RNaseH-mediated mechanism or mechanism related to steric hindrance of translation and has an asymmetric format. In some embodiments, an APOC3 oligonucleotide which has an asymmetric format comprises a first wing, a core and a second wing, wherein the core comprises a region of 5 or more contiguous 2′-deoxy nucleotides which can anneal to a target mRNA and form a structure recognized by RNaseH, and wherein the structure of the first and second wings are different. In some embodiments, the first and second wings differ in their 2′-modifications and/or internucleotidic linkages, or pattern of stereochemistry of the internucleotidic linkages.

[0461] In some embodiments, an APOC3 oligonucleotide is capable of decreasing the expression, activity and/or level of a target gene and/or a gene product thereof comprises a neutral internucleotidic linkage (e.g., a neutral backbone).

[0462] In some embodiments, an APOC3 oligonucleotide comprises a neutral backbone. In some embodiments, an APOC3 oligonucleotide comprises an internucleotidic linkage which is or comprises a triazole, neutral triazole, or alkyne. In some embodiments, a nucleic acid (including but not limited to an APOC3 oligonucleotide) which comprises an internucleotidic linkage which comprises a triazole, neutral triazole, or alkyne, wherein the internucleotidic linkage is stereocontrolled and in the Rp or Sp configuration. In some embodiments, an internucleotidic linkage comprising a triazole has a formula of:

[chemical structure]

In some embodiments, an internucleotidic linkage comprising a neutral triazole has the formula of:

[chemical structure]

where X is O or S. In some embodiments, an internucleotidic linkage comprising an alkyne has the formula of:

[chemical structure]

wherein X is O or S.
In some embodiments, an internucleotidic linkage comprises a cyclic guanidine. In some embodiments, an internucleotidic linkage comprises a cyclic guanidine and has the structure of:

[chemical structure]

In some embodiments, a neutral internucleotidic linkage or internucleotidic linkage comprising a cyclic guanidine is stereochemically controlled. In some embodiments, a neutral internucleotidic linkage improves the activity, delivery and/or stability of an APOC3 oligonucleotide and/or the ability of an APOC3 oligonucleotide to perform endosomal escape.

[0463] As appreciated by those skilled in the art, in some instances, [symbol] may be used to indicate a connection site (as

[chemical structure]

in some instances, [symbol] may be used to indicate a stereorandom connection.

[0464] Length of an APOC3 Oligonucleotide

[0465] In some embodiments, provided oligonucleotides are capable of directing a decrease in the expression and/or level of a target gene or its gene product. In some embodiments, provided oligonucleotides are capable of directing a decrease in the expression and/or level of a target gene or its gene product via RNA interference. In some embodiments, provided oligonucleotides are capable of directing a decrease in the expression and/or level of a target gene or its gene product via a biochemical mechanism which does not involve RNA interference or RISC (including, but not limited to, RNaseH-mediated knockdown or steric hindrance of gene expression). In some embodiments, provided oligonucleotides are capable of directing a decrease in the expression and/or level of a target gene or its gene product via RNA interference and/or RNase H-mediated knockdown. In some embodiments, provided oligonucleotides are capable of directing a decrease in the expression and/or level of a target gene or its gene product by sterically blocking translation after annealing to a target gene mRNA, and/or by altering or interfering with mRNA splicing and/or exon inclusion or exclusion. In some embodiments, provided oligonucleotides can have any length, wherein the length of an APOC3 oligonucleotide is such that the oligonucleotide is capable of directing a decrease in the expression and/or level of a target gene or its gene product.

[0466] In some embodiments, the length of an APOC3 oligonucleotide is such that the oligonucleotide is capable of directing a decrease in the expression and/or level of a target gene or its gene product.

[0467] In some embodiments, the length of a RNAi agent is such that the RNAi agent is capable of directing RNA interference of a specific target transcript in a sequence-specific manner. In some embodiments, the RNAi agent comprises a sufficient number of nucleobases of sufficient identity to recognize a target transcript. In some embodiments, the RNAi agent is also be of a length suitable for mediating RNAi interference.

[0468] The target portion of the sequence will be at least long enough to serve as a substrate for iRNA-directed cleavage at or near that portion. For example, the target sequence will generally be from about 9-36 nucleotides (“nt”) in length, e.g., about 15-30 nucleotides in length, including all sub-ranges therebetween. Examples of single-stranded RNAi agents of various lengths are shown in Table 1A.

[0469] FIG. 1 illustrates non-limiting examples of single-stranded RNAi agents having lengths from 19 to 25. Single-stranded RNAi agents having any of each of these lengths were constructed and found to be capable of knocking down a target gene. Thus, a provided single-stranded RNAi agent can be any of a variety of different lengths.

[0470] Non-limiting examples of formats of ssRNAi agents which are 19 bases long include: Formats 20-21 of FIG. 1.

[0471] Non-limiting examples of formats of ssRNAi agents which are 20 bases long include: Format 19 of FIG. 1.

[0472] 5′-End of an APOC3 Oligonucleotide, Including a Single-Stranded RNAi Agent

[0473] In some embodiments, the structure of the 5′-end of an APOC3 oligonucleotide is such that the oligonucleotide is capable of directing a decrease in the expression and/or level of a target gene or its gene product.

[0474] In some embodiments, the structure of the 5′-end of a RNAi agent is such that the RNAi agent is capable of directing RNA interference of a specific target transcript in a sequence-specific manner.

[0475] In some embodiments, a provided oligonucleotide can comprise any 5′-end region, 5′-end structure, 5′-end group, 5′-end nucleoside, or 5′-end nucleotide described herein or known in the art. In some embodiments, a provided oligonucleotide capable of directing RNase H-mediated knockdown can comprise any 5′-end region, 5′-end structure, 5′-end group, 5′-end nucleoside, or 5′-end nucleotide described herein or known in the art. In some embodiments, a provided oligonucleotide capable of directing RNA interference can comprise any 5′-end region, 5′-end structure, 5′-end group, 5′-end nucleoside, or 5′-end nucleotide described herein or known in the art. In some embodiments, a provided oligonucleotide capable of directing RNA interference and RNase H-mediated knockdown can comprise any 5′-end region, 5′-end structure, 5′-end group, 5′-end nucleoside, or 5′-end nucleotide described herein or known in the art.

[0476] Among other things, the present disclosure recognizes that 5′-end structures of oligonucleotides, optionally in combination with additional features in accordance with the present disclosure, can provide unexpected advantages. In some embodiments, the present disclosures provides 5′-end groups (corresponding to 5′-HO—CH₂— of ribose found in natural RNA (or deoxyribose found in natural DNA)) that can surprisingly improve one or more properties and/or activities (e.g., stability, activity, manufacture cost, etc.) of oligonucleotides.

[0477] In some embodiments, 5′—OH groups of provided oligonucleotides are unmodified, i.e., they exist as free —OH. In some embodiments, a 5′-end group is 5′-HO—CH₂—. Among other things, the present disclosure demonstrates that a provided oligonucleotide with free 5′—OH groups can achieve properties and/or activities (e.g., stability, RNAi activity when used as ss-RNAi agent, etc.) comparable to an otherwise identical oligonucleotide comprising 5′-phosphate (or derivatives thereof) groups, despite reports in the literature that certain activities, e.g., RNAi activity, require presence of 5′-phosphate groups.

[0478] In some embodiments, a 5′-end group comprises no phosphorus atom. In some embodiments, a 5′-end group comprises no phosphate groups, or derivatives or bioisosteres thereof. In some embodiments, a 5′-end group comprises no acidic groups. In some embodiments, a 5′-end group comprises no carboxyl groups. In some embodiments, a 5′-end comprises no phosphorus atom or carboxyl groups. In some embodiments, a 5′-end group is 5′-HO—CH₂—. Among other things, the present disclosure demonstrates that provided oligonucleotides with no 5′-phosphates or derivatives or bioisosteres thereof can surprisingly achieve activities comparable to oligonucleotides that have 5′-phosphates but are otherwise identical, for example, in knock-down of mRNA levels of target genes, through RNAi pathways.

[0479] In some embodiments, a 5′-nucleoside unit of a provided oligonucleotide (which includes the sugar and nucleobase moieties but not the internucleotidic linkage between the 5′-nucleoside unit and the second nucleoside unit from the 5′-end) comprises no phosphate group, or derivatives or bioisosteres thereof. In some embodiments, a 5′-nucleoside unit comprises no phosphorus atom. In some embodiments, a 5′-nucleoside comprises no acidic groups. In some embodiments, a 5′-nucleoside unit comprises no —COOH groups or a salt form thereof.

[0480] In some embodiments, a 5′-end group is or comprises a phosphate group, or a derivative or a bioisostere thereof. In some embodiments, a 5′-nucleoside unit comprises a 5′-group which is a phosphate group, or a derivative or a bioisostere thereof. As appreciated by a person having ordinary skill in the art, a number of such groups are known in the art and can be utilized in accordance with the present disclosure.

[0481] In some embodiments, a 5′-end group is —CH₂—O—P(O)(OH)—(OH) or a salt form thereof.

[0482] In some embodiments, a provided 5′-nucleoside unit has the structure of

[chemical structure]

or a salt form thereof. In some embodiments, a provided 5′-nucleoside unit has the structure of

[chemical structure]

or a salt form thereof. In some embodiments, X is O. In some embodiments, X is S. In some embodiments, R^{E} is —(R)—CH(CH₃)—O—P(O)(OH)—S—H or a salt form thereof. In some embodiments, R^{E} is —(R)—CH(CH₃)—O—P(O)(OH)—O—H or a salt form thereof. In some embodiments, R^{E} is —(S)—CH(CH₃)—O—P(O)(OH)—S—H or a salt form thereof. In some embodiments, R^{E} is —(S)—CH(CH₃)—O—P(O)(OH)—O—H or a salt form thereof. In some embodiments, a provided 5′-nucleoside unit has the structure of

[chemical structure]

or a salt form thereof. In some embodiments, a provided 5′-nucleoside unit has the structure of

[chemical structure]

or a salt form thereof.

[0483] As readily appreciated by a person having ordinary skill in the art, provided compounds, e.g., oligonucleotides, or partial structures thereof, e.g., 5′-end structures, internucleotidic linkages, etc. of oligonucleotides, may partially, sometimes predominantly, exist as one or more salt forms thereof at certain pH, e.g., physiological pH, for example, due to one or more acidic and/or basic moieties therein. In some embodiments, a provided 5′-nucleoside unit may partially, sometimes predominately, exist as one or more its salt forms. For example, depending on pH,

[chemical structure]

may exist as

[chemical structure]

or any combinations thereof. Unless explicitly specified otherwise, all salt forms are included when provided compounds or structures are recited.

[0484] In some embodiments, R^{E} is -L-P(O)(XR)₂ or a salt form thereof. In some embodiments, R^{E} is -L-P(O)(XR)₂ or a salt form thereof, wherein each X is independently —O—, —S—, or a covalent bond. In some embodiments, R^{E} is -L-P(O)(OR)₂ or a salt form thereof. In some embodiments, R^{E} is -L-P(O)(OR)(SR) or a salt form thereof. In some embodiments, R^{E} is -L-P(O)(OR)(R) or a salt form thereof. In some embodiments, L is a covalent bond, or a bivalent, optionally substituted, linear or branched C₁₋₆ aliphatic, wherein one or more methylene units are optionally and independently replaced with —O—, —S— or —N(R′)—. In some embodiments, R^{E} is -L-R^{5s}. In some embodiments, R^{E} is —X-L-R. In some embodiments, R^{E} is

[chemical structure]

In some embodiments, X in R^{E} is —C(R)₂—. In some embodiments, X is —O—. In some embodiments, X is —S—. In some embodiments, X is —N(R)—. In some embodiments, L comprises an optionally substituted, bivalent or multivalent

[chemical structure]

group. In some embodiments, L comprises an optionally substituted

[chemical structure]

group. In some embodiments, L comprises a

[chemical structure]

group. In some embodiments, R is independently —H, or an optionally substituted group selected from C₁₋₁₀ alkyl, C₁₋₁₀ allyl, and C₆₋₁₄ aryl. In some embodiments, R is —H. In some embodiments, R^{E} is optionally substituted

[chemical structure]

In some embodiments, R^{E} is

[chemical structure]

[0485] Many phosphate derivatives and/or bioisosteres, and 5′-nucleoside units are described in literature and can be utilized in accordance with the present disclosure, for example, some such structures are described in, e.g., US 2016-0194349; US 2016-0186175; US 20130323836, etc. In some embodiments, a 5′ end group R^{E}, or a 5′-nucleoside unit, is described in, for example, Allerson et al. 2005 J. Med. Chem. 48: 901-04; Lima et al. 2012 Cell 150: 883-894; Prakash et al. 2015 Nucl. Acids Res. 43: 2993-3011; and/or Prakash et al. 2016 Bioorg. Med. Chem. Lett. 26: 26: 2817-2820, for example, T-VP, T-PO, etc.

[0486] Bridged Morpholinos and cyclohexenyl nucleotides and nucleosides are described in, for example, US patent application publication 2016-0186175, which can be utilized in accordance with the present disclosure.

[0487] Example embodiments of variables are extensively described in the present disclosure. For structures with two or more variables, unless otherwise specified, each variable can independently be any embodiment described herein.

[0488] In some embodiments, an APOC3 oligonucleotide capable of directing a decrease in the expression and/or level of a target gene or its gene product can comprise any 5′-end described herein or known in the art.

[0489] In some embodiments, an APOC3 oligonucleotide, an APOC3 oligonucleotide that directs RNA interference, an APOC3 oligonucleotide that directs RNase H-mediated knockdown can comprise any 5′-end described herein or known in the art.

[0490] In some embodiments, an APOC3 oligonucleotide, an APOC3 oligonucleotide that directs RNase H-mediated knockdown, or an APOC3 oligonucleotide that directs both RNA interference and RNase H-mediated knockdown can comprise any 5′-end described herein or known in the art.

[0491] In some embodiments, the 5′-end of a provided single-stranded RNAi agent comprises a phosphorus-comprising moiety (e.g., a 5′-end comprises a phosphorus). Non-limiting examples of ssRNAi formats wherein the 5′-end comprises a phosphorus-comprising moiety include Formats 1-15, 20-21, 23-31, 80-82, 92-95, 97-102, and 104-107 of FIG. 1.

[0492] In some embodiments, the 5′-end of a provided single-stranded RNAi agent does not comprise a phosphorus-comprising moiety (e.g., a 5′-end comprises a phosphorus). Non-limiting examples of ssRNAi formats wherein the 5′-end does not comprise a phosphorus-comprising moiety include Formats 16-19, 22, 32-79, 83-91, 96, and 103 of FIG. 1.

[0493] In some embodiments, the 5′-end of a provided single-stranded RNAi agent comprises a moiety comprising a phosphate, such as a phosphodiester, phosphorothioate, phosphorodithioate, H-phosphonate, or other moiety similar or identical to a phosphate-comprising internucleotidic linkage. In some embodiments, the 5′-end of a provided single-stranded RNAi agent comprises a moiety comprising a phosphate, but which is not a phosphodiester; such a moiety in some embodiments is referred to as a phosphate mimic, modified phosphate or phosphate analog.

[0494] In some embodiments, the 5′-end of a provided single-stranded RNAi agent does not comprise a moiety comprising a phosphate.

[0495] In some embodiments of a single-stranded RNAi agent, a 5′ end structure has a structure selected from: 5′-(R)-Me OH T, 5′-(R)-Me PO T, 5′-(R)-Me PS T, 5′-(R)-Me PH T, 5′-(S)-Me OH T, 5′-(S)-Me PO T, 5′-(S)-Me PS T, and 5′-(S)—PH T.

[0496] In some embodiments of a provided single-stranded RNAi agent, which comprise a phosphorus-comprising moiety at the 5′-end structure which is represented by a structure selected from the Formula IV-a (Mod022 also known as C3 PO and n-propyl), IV-b (Mod022*), IV-c (POMod023*), IV-d (PSMod023*), and IV-e (PHMod023*):

[chemical structure]

[0497] In some embodiments of a provided single-stranded RNAi agent, which comprise a phosphorus-comprising moiety at the 5′-end structure is represented by a structure selected of the structure of Formula IV-f (also known as n-propyl, C3 PO or Mod022):

[chemical structure]

[0498] wherein 5′ indicates the attachment point to the 5′ carbon of a sugar.

[0499] In some embodiments of a provided single-stranded RNAi agent, which comprise a phosphorus-comprising moiety at the 5′-end structure is represented by a structure selected of the following structure (also known as C3 PS or Mod022*):

[chemical structure]

[0500] wherein 5′ indicates the attachment point to the 5′ carbon of a sugar (e.g., of N1).

[0501] In some embodiments of a provided single-stranded RNAi agent, which comprise a phosphorus-comprising moiety at the 5′-end structure is represented by a structure selected of the structure of Formula IV-g (also known as DimethylC3 or C3dimethyl PS or Mod023*):

[chemical structure]

[0502] wherein 5′ indicates the attachment point to the 5′ carbon of a sugar (e.g., of N1).

[0503] In some embodiments, a single-stranded RNAi agent comprises a 5′-end structure which is selected from any of PO (phosphorodiester), Formula IV-h; PH (H-Phosphonate), Formula IV-i; and PS (Phosphorothioate), Formula IV-j:

[chemical structure]

In some embodiments of a provided single-stranded RNAi agent, which comprise a phosphorus-comprising moiety at the 5′-end structure is represented by a structure selected from any of the following:

[chemical structure]

[0504] wherein 5′ indicates the attachment point to the 5′ carbon of a sugar (e.g., of N1).

[0505] In some embodiments, P in any of Formula IV-a to IV-j is stereorandom or stereodefined as in the Sp or Rp configuration.

[0506] In some embodiments, a 5′-end structure is selected from any of: a phosphate, a phosphate analogue, 5′-monophosphate ((HO)2(O)P—O-5′), 5′-diphosphate ((HO)2(O)P—O—P(HO)(O)—O-5′-triphosphate ((HO)2(O)P—O—(HO)(O)P—O—P(HO)(O)—O-5′), 5′-guanosine cap (7-methylated or non-methylated) (7m-G-O-5′-(HO)(O)P—O—(HO)(O)P—O—P(HO)(O)—O-5′), 5′-adenosine cap (Appp), and any modified or unmodified nucleotide cap structure (N—O-5′-(HO)(O)P—O—(HO)(O)P—O—P(HO)(O)—O-5′), 5′-monothiophosphate (phosphorothioate; (HO)2(S)P—O-5′), 5′-monodithiophosphate (phosphorodithioate; (HO)(HS)(S)P—O-5′), 5′-phosphorothiolate ((HO)2(O)P—S-5′); any additional combination of oxygen/sulfur replaced monophosphate, diphosphate and triphosphates (e.g. 5′-alpha-thiotriphosphate, 5′-gamma-thiotriphosphate, etc.), 5′-phosphoramidates ((HO)2(O)P—NH-5′, (HO)(NH2)(O)P—O-5′), 5′-alkylphosphonates (R=alkyl=methyl, ethyl, isopropyl, propyl, etc., e.g. RP(OH)(O)—O-5′-, (OH)2(O)P-5′-CH₂—), 5′-alkyletherphosphonates (R=alkylether=methoxymethyl (MeOCH2-), ethoxymethyl, etc., e.g. RP(OH)(O)—O-5′-).

[0507] In some embodiments, a 5′-end comprising a phosphorus-comprising moiety can have particular advantages, in that the single-stranded RNAi agents comprising them may be more active in RNA interference.

[0508] In some embodiments, a 5′ end structure has a structure of a 5′-nucleotide or a modified 5′-nucleotide, a 5′-nucleotide analog, a 5′-nucleoside or a modified 5′-nucleoside or a 5′-nucleoside analog.

[0509] In some embodiments, a 5′ end structure, has a structure of any of: a 5′-guanosine cap, a 5′-adenosine cap, a 5′-monothiophosphate, a 5′-monodithiophosphate, a 5′-phosphorothiolate, a 5′-phosphoramidate, a 5′-alkylphosphonate, and a 5′-alkyletherphosphonate; a 5′-monophosphate, a 5′-diphosphate, and a 5′-triphosphate; 5′-triphosphate; a monophosphate, a diphosphate, or a triphosphate in which at least one oxygen atom of the monophosphate, diphosphate, or triphosphate is replaced with a sulfur atom; 5′-alpha-thiotriphosphate and 5′-gamma-thiotriphosphate; alkylphosphonate; alkylphosphonate has the formula: RP(OH)(O)—O-5′ or (OH)₂(O)P-5′—CH₂—, wherein R is a C₁-C₃ alkyl; alkyletherphosphonate; or alkyletherphosphonate of the formula: RP(OH)(O)—O-5′, wherein R is an alkylether.

[0510] Various 5′-nucleosides are described in, for example, U.S. patent application Ser. No. 14/959,714, published as US 2016-0194349 A1; U.S. patent application Ser. No. 14/983,907, published as US 2016-0186175 A1; or U.S. patent application Ser. No. 13/696,796, published as US 20130323836.

[0511] In some embodiments, a 5′-end structure is a vinylphosphonate.

[0512] In certain embodiments, oligomeric compounds are provided wherein said 5′-terminal compound has Formula VIII-c wherein G is F, OCH₃ or O(CH₂)₂—OCH₃.

[0513] In some embodiments, a 5′ end structure has a structure selected from: 5′-(R)-Me OH T, 5′-(R)-Me PO T, 5′-(R)-Me PS T, 5′-(R)-Me PH T, 5′-(S)-Me OH T, 5′-(S)-Me PO T, 5′-(S)-Me PS T, and 5′-(S)—PH T.

[0514] In some embodiments, a 5′ end structure has the structure of 5′-(R)-Me OH T.

[0515] In some embodiments, a 5′ end structure has the structure of 5′-(R)-Me PO T.

[0516] In some embodiments, a 5′ end structure has the structure of 5′-(R)-Me PS T.

[0517] In some embodiments, a 5′ end structure has the structure of 5′-(R)-Me PH T.

[0518] In some embodiments, a 5′ end structure has the structure of 5′-(S)-Me OH T.

[0519] In some embodiments, a 5′ end structure has the structure of 5′-(S)-Me PO T.

[0520] In some embodiments, a 5′ end structure has the structure of 5′-(S)-Me PS T.

[0521] In some embodiments of a single-stranded RNAi agent, a 5′ end structure has the structure of 5′-(R)-Me PO T.

[0522] In some embodiments of a single-stranded RNAi agent, a 5′ end structure has the structure of 5′-(R)-Me PS T.

[0523] In some embodiments of a single-stranded RNAi agent, a 5′ end structure has the structure of 5′-(R)-Me PH T.

[0524] In some embodiments of a single-stranded RNAi agent, a 5′ end structure has the structure of 5′-(S)-Me OH T.

[0525] In some embodiments of a single-stranded RNAi agent, a 5′ end structure has the structure of 5′-(S)-Me PO T.

[0526] In some embodiments of a single-stranded RNAi agent, a 5′ end structure has the structure of 5′-(S)-Me PS T.

[0527] In some embodiments of a single-stranded RNAi agent, a 5′ end structure has the structure of 5′-(S)-Me PH T.

[0528] In some embodiments, a 5′ end structure has the structure of 5′-(S)-Me PH T. In addition, some references such as EP 1520022 B1, paragraph 6, have reported that a 5′ phosphate is required at the target-complementary strand (e.g., the antisense strand) of a siRNA duplex for RISC activity. U.S. Pat. No. 8,729,036, column 2, also noted that 5′ phosphates are reported to be essential for RNA interference. U.S. Pat. No. 8,729,036, column 3, also reported that a 5′ phosphate was required for single-stranded antisense siRNAs to trigger RNAi in HeLa S100 extract. However, the present disclosure has demonstrated that various single-stranded RNAi agents which do not comprise a 5′ phosphate are capable of directing RNA interference.

[0529] In some embodiments, a 5′-end comprises a phosphate-comprising moiety such as T-VP or T-PO, or any other suitable RNAi agent 5′-end compound as described in, for example, Allerson et al. 2005 J. Med. Chem. 48: 901-04; Lima et al. 2012 Cell 150: 883-894; Prakash et al. 2015 Nucl. Acids Res. 43: 2993-3011; and/or Prakash et al. 2016 Bioorg. Med. Chem. Lett. 26: 26: 2817-2820.

[0530] In some embodiments, a 5′-end which does not comprise a phosphorus-comprising moiety can have particular advantages, in that the single-stranded RNAi agent can be easier to synthesize, and it may not be necessary to protect the phosphorus-comprising moiety from degradation. In some embodiments, a 5′-end of a provided single-stranded RNAi agent which does not comprise a phosphorus-comprising moiety comprises a moiety which can act as a substrate for a mammalian kinase which, inside a target cell, is able to attach a phosphorus-comprising moiety at the 5′-end of the single-stranded RNAi agent.

[0531] In some embodiments, a 5′-end does not comprise a phosphorus-comprising moiety.

[0532] In some embodiments of a single-stranded RNAi agent, the single-stranded RNAi agent comprises a 5′ terminal OH, and the first nucleoside is 2′-deoxy.

[0533] In some embodiments of a single-stranded RNAi agent, the single-stranded RNAi agent comprises a 5′ terminal OH, and the first nucleoside is 2′-deoxy T.

[0534] In some embodiments of a single-stranded RNAi agent, the single-stranded RNAi agent comprises a 5′ terminal OH, and the first nucleoside is 2′-deoxy U.

[0535] In some embodiments of a single-stranded RNAi agent, the single-stranded RNAi agent comprises a 5′ terminal OH, and the first nucleoside is 2′-deoxy A.

[0536] In some embodiments of a single-stranded RNAi agent, the single-stranded RNAi agent comprises a 5′ terminal OH, and the first nucleoside is 2′-deoxy G.

[0537] In some embodiments of a single-stranded RNAi agent, the single-stranded RNAi agent comprises a 5′ terminal OH, and the first nucleoside is 2′-deoxy C.

[0538] In some embodiments of a single-stranded RNAi agent, the single-stranded RNAi agent comprises a 5′ terminal OH, and the first nucleoside is 2′-deoxy.

[0539] In some embodiments of a single-stranded RNAi agent, the single-stranded RNAi agent comprises a 5′ terminal OH, and the first nucleoside is 2′-deoxy T. In some embodiments of a single-stranded RNAi agent, the single-stranded RNAi agent comprises a 5′ terminal OH, and the first nucleoside is 2′-deoxy U.

[0540] In some embodiments of a single-stranded RNAi agent, the single-stranded RNAi agent comprises a 5′ terminal OH, and the first nucleoside is 2′-deoxy A. In some embodiments of a single-stranded RNAi agent, the single-stranded RNAi agent comprises a 5′ terminal OH, and the first nucleoside is 2′-deoxy G.

[0541] In some embodiments of a single-stranded RNAi agent, the single-stranded RNAi agent comprises a 5′ terminal OH, and the first nucleoside is 2′-deoxy C.

[0542] In some embodiments of a single-stranded RNAi agent, the single-stranded RNAi agent comprises a 5′ terminal OH, and the first nucleoside is 2′-OMe.

[0543] In some embodiments of a single-stranded RNAi agent, the single-stranded RNAi agent comprises a 5′ terminal OH, and the first nucleoside is 2′-OMe T.

[0544] In some embodiments of a single-stranded RNAi agent, the single-stranded RNAi agent comprises a 5′ terminal OH, and the first nucleoside is 2′-OMe U.

[0545] In some embodiments of a single-stranded RNAi agent, the single-stranded RNAi agent comprises a 5′ terminal OH, and the first nucleoside is 2′-OMe A.

[0546] In some embodiments of a single-stranded RNAi agent, the single-stranded RNAi agent comprises a 5′ terminal OH, and the first nucleoside is 2′-OMe G.

[0547] In some embodiments of a single-stranded RNAi agent, the single-stranded RNAi agent comprises a 5′ terminal OH, and the first nucleoside is 2′-OMe C.

[0548] In some embodiments of a single-stranded RNAi agent, the single-stranded RNAi agent comprises a 5′ terminal OH, and the first nucleoside is 2′-OMe.

[0549] In some embodiments of a single-stranded RNAi agent, the single-stranded RNAi agent comprises a 5′ terminal OH, and the first nucleoside is 2′-OMe T.

[0550] In some embodiments of a single-stranded RNAi agent, the single-stranded RNAi agent comprises a 5′ terminal OH, and the first nucleoside is 2′-OMe U. In some embodiments of a single-stranded RNAi agent, the single-stranded RNAi agent comprises a 5′ terminal OH, and the first nucleoside is 2′-OMe A.

[0551] In some embodiments of a single-stranded RNAi agent, the single-stranded RNAi agent comprises a 5′ terminal OH, and the first nucleoside is 2′-OMe G.

[0552] In some embodiments of a single-stranded RNAi agent, the single-stranded RNAi agent comprises a 5′ terminal OH, and the first nucleoside is 2′-OMe C.

[0553] In some embodiments of a single-stranded RNAi agent, the single-stranded RNAi agent comprises a 5′ terminal OH, and the first nucleoside is 2′-F.

[0554] In some embodiments of a single-stranded RNAi agent, the single-stranded RNAi agent comprises a 5′ terminal OH, and the first nucleoside is 2′-F T.

[0555] In some embodiments of a single-stranded RNAi agent, the single-stranded RNAi agent comprises a 5′ terminal OH, and the first nucleoside is 2′-F U.

[0556] In some embodiments of a single-stranded RNAi agent, the single-stranded RNAi agent comprises a 5′ terminal OH, and the first nucleoside is 2′-F A.

[0557] In some embodiments of a single-stranded RNAi agent, the single-stranded RNAi agent comprises a 5′ terminal OH, and the first nucleoside is 2′-F G.

[0558] In some embodiments of a single-stranded RNAi agent, the single-stranded RNAi agent comprises a 5′ terminal OH, and the first nucleoside is 2′-F C.

[0559] In some embodiments of a single-stranded RNAi agent, the single-stranded RNAi agent comprises a 5′ terminal OH, and the first nucleoside is 2′-F.

[0560] In some embodiments of a single-stranded RNAi agent, the single-stranded RNAi agent comprises a 5′ terminal OH, and the first nucleoside is 2′-F T.

[0561] In some embodiments of a single-stranded RNAi agent, the single-stranded RNAi agent comprises a 5′ terminal OH, and the first nucleoside is 2′-F U.

[0562] In some embodiments of a single-stranded RNAi agent, the single-stranded RNAi agent comprises a 5′ terminal OH, and the first nucleoside is 2′-F A. In some embodiments of a single-stranded RNAi agent, the single-stranded RNAi agent comprises a 5′ terminal OH, and the first nucleoside is 2′-F G. In some embodiments of a single-stranded RNAi agent, the single-stranded RNAi agent comprises a 5′ terminal OH, and the first nucleoside is 2′-F C.

[0563] In some embodiments of a single-stranded RNAi agent, the single-stranded RNAi agent comprises a 5′ terminal phosphate, and the first nucleoside is 2′-deoxy.

[0564] In some embodiments of a single-stranded RNAi agent, the single-stranded RNAi agent comprises a 5′ terminal phosphate, and the first nucleoside is 2′-deoxy T.

[0565] In some embodiments of a single-stranded RNAi agent, the single-stranded RNAi agent comprises a 5′ terminal phosphate, and the first nucleoside is 2′-deoxy U.

[0566] In some embodiments of a single-stranded RNAi agent, the single-stranded RNAi agent comprises a 5′ terminal phosphate, and the first nucleoside is 2′-deoxy A.

[0567] In some embodiments of a single-stranded RNAi agent, the single-stranded RNAi agent comprises a 5′ terminal phosphate, and the first nucleoside is 2′-deoxy G.

[0568] In some embodiments of a single-stranded RNAi agent, the single-stranded RNAi agent comprises a 5′ terminal phosphate, and the first nucleoside is 2′-deoxy C.

[0569] In some embodiments of a single-stranded RNAi agent, the single-stranded RNAi agent comprises a 5′ terminal phosphate, and the first nucleoside is 2′-deoxy.

[0570] In some embodiments of a single-stranded RNAi agent, the single-stranded RNAi agent comprises a 5′ terminal phosphate, and the first nucleoside is 2′-deoxy T.

[0571] In some embodiments of a single-stranded RNAi agent, the single-stranded RNAi agent comprises a 5′ terminal phosphate, and the first nucleoside is 2′-deoxy U.

[0572] In some embodiments of a single-stranded RNAi agent, the single-stranded RNAi agent comprises a 5′ terminal phosphate, and the first nucleoside is 2′-deoxy A. In some embodiments of a single-stranded RNAi agent, the single-stranded RNAi agent comprises a 5′ terminal phosphate, and the first nucleoside is 2′-deoxy G.

[0573] In some embodiments of a single-stranded RNAi agent, the single-stranded RNAi agent comprises a 5′ terminal phosphate, and the first nucleoside is 2′-deoxy C.

[0574] In some embodiments of a single-stranded RNAi agent, the single-stranded RNAi agent comprises a 5′ terminal phosphate, and the first nucleoside is 2′-F.

[0575] In some embodiments of a single-stranded RNAi agent, the single-stranded RNAi agent comprises a 5′ terminal phosphate, and the first nucleoside is 2′-F T.

[0576] In some embodiments of a single-stranded RNAi agent, the single-stranded RNAi agent comprises a 5′ terminal phosphate, and the first nucleoside is 2′-F U.

[0577] In some embodiments of a single-stranded RNAi agent, the single-stranded RNAi agent comprises a 5′ terminal phosphate, and the first nucleoside is 2′-F A.

[0578] In some embodiments of a single-stranded RNAi agent, the single-stranded RNAi agent comprises a 5′ terminal phosphate, and the first nucleoside is 2′-F G.

[0579] In some embodiments of a single-stranded RNAi agent, the single-stranded RNAi agent comprises a 5′ terminal phosphate, and the first nucleoside is 2′-F C.

[0580] In some embodiments of a single-stranded RNAi agent, the single-stranded RNAi agent comprises a 5′ terminal phosphate, and the first nucleoside is 2′-F.

[0581] In some embodiments of a single-stranded RNAi agent, the single-stranded RNAi agent comprises a 5′ terminal phosphate, and the first nucleoside is 2′-F T.

[0582] In some embodiments of a single-stranded RNAi agent, the single-stranded RNAi agent comprises a 5′ terminal phosphate, and the first nucleoside is 2′-F U. In some embodiments of a single-stranded RNAi agent, the single-stranded RNAi agent comprises a 5′ terminal phosphate, and the first nucleoside is 2′-F A. In some embodiments of a single-stranded RNAi agent, the single-stranded RNAi agent comprises a 5′ terminal phosphate, and the first nucleoside is 2′-F G.

[0583] In some embodiments of a single-stranded RNAi agent, the single-stranded RNAi agent comprises a 5′ terminal phosphate, and the first nucleoside is 2′-F C.

[0584] In some embodiments of a single-stranded RNAi agent, the single-stranded RNAi agent comprises a 5′ terminal phosphate, and the first nucleoside is 2′-OMe.

[0585] In some embodiments of a single-stranded RNAi agent, the single-stranded RNAi agent comprises a 5′ terminal phosphate, and the first nucleoside is 2′-OMe T.

[0586] In some embodiments of a single-stranded RNAi agent, the single-stranded RNAi agent comprises a 5′ terminal phosphate, and the first nucleoside is 2′-OMe U.

[0587] In some embodiments of a single-stranded RNAi agent, the single-stranded RNAi agent comprises a 5′ terminal phosphate, and the first nucleoside is 2′-OMe A.

[0588] In some embodiments of a single-stranded RNAi agent, the single-stranded RNAi agent comprises a 5′ terminal phosphate, and the first nucleoside is 2′-OMe G.

[0589] In some embodiments of a single-stranded RNAi agent, the single-stranded RNAi agent comprises a 5′ terminal phosphate, and the first nucleoside is 2′-OMe C.

[0590] In some embodiments of a single-stranded RNAi agent, the single-stranded RNAi agent comprises a 5′ terminal phosphate, and the first nucleoside is 2′-OMe. In some embodiments of a single-stranded RNAi agent, the single-stranded RNAi agent comprises a 5′ terminal phosphate, and the first nucleoside is 2′-OMe T.

[0591] In some embodiments of a single-stranded RNAi agent, the single-stranded RNAi agent comprises a 5′ terminal phosphate, and the first nucleoside is 2′-OMe U. In some embodiments of a single-stranded RNAi agent, the single-stranded RNAi agent comprises a 5′ terminal phosphate, and the first nucleoside is 2′-OMe A. In some embodiments of a single-stranded RNAi agent, the single-stranded RNAi agent comprises a 5′ terminal phosphate, and the first nucleoside is 2′-OMe G.

[0592] In some embodiments of a single-stranded RNAi agent, the single-stranded RNAi agent comprises a 5′ terminal phosphate, and the first nucleoside is 2′-OMe C.

[0593] In some embodiments, an APOC3 oligonucleotide comprises an additional component which binds to ASPGR. In some embodiments, the additional component is on the 5′ end of the oligonucleotide.

[0594] In some embodiments, an APOC3 oligonucleotide comprises an additional component which is or comprises a compound of Formula (K)

[chemical structure]

wherein R is —CN, —CH₂—CN, —C≡CH, —CH₂—N₃, —CH₂—NH₂, —CH₂—N(R)—S(O)₂—R, —CH₂—CO₂H, —CO₂H, —CH₂—OH, —CH₂—SH, —CH═CH—R, —CH₂—R, —CH₂—S—R, —CH₂—N(R)—R, —CH₂—N(R)—C(O)—R, —CH₂—N(R)—C(O)—O—R, —CH₂—N(R)—C(O)—N(R)—R, —CH₂—O—R, —CH₂—O—C(O)—R, —C(O)—N(R)—R, —CH₂—O—C(O)—O—R, —CH₂—S(O)—R, —CH₂—S(O)₂—R, —CH₂—S(O)₂—N(R)—R, —C(O)—NH₂, —C(O)—O—R, —C(O)—N(R)—R, or aryl or heteroaryl, wherein the aryl or heteroaryl is optionally substituted with R,
or R is —Z—X—Y wherein X is a linker or a drug delivery system, Y is absent or is a ligand selected from the group consisting of a small molecule, an amino acid sequence, a nucleic acid sequence, an antibody, an oligomer, a polymer, genetically derived material, a liposome, a nanoparticle, dye, fluorescent probe, or a combination thereof, and Z is absent or is —C≡C—, —CH═CH—, —CH₂—, —CH₂—O—, —C(O)—N(R)—, —CH₂—S(O)—, —CH₂—S(O)₂—, —CH₂—S(O)₂—N(R)—, —C(O)—O—, —CH₂—N(R)—, —CH₂—N(R)—C(O)—, —CH₂—N(R)—S(O)₂—, —CH₂—N(R)—C(O)—O—, —CH₂—N(R)—C(O)—N(R)—, —CH₂—O—C(O)—, —CH₂—O—C(O)—N(R)—, —CH₂—O—C(O)—O—, or aryl or heteroaryl, wherein the aryl or heteroaryl is optionally substituted with R;
R⁶² is —OH, —N₃, —N(R)₂, —N(R)—C(O)—R′—N(R)—C(O)—N(R)_{2′}—N(R)—C(O)—OR, tetrazole, or triazole, wherein the tetrazole and triazole are optionally substituted with R,
and wherein when R is —CH₂—OH, R is —N₃, —N(R)₂, —N(R)—C(O)—R′—N(R)—C(O)—N(R)₂—N(R)—C(O)—OR, tetrazole, or triazole, wherein the tetrazole and triazole are optionally substituted with R;
each R is independently —H, halo-substituted (C₁-C₅)alkyl, or (C₃-C₆)cycloalkyl, wherein a —CH₂— group of the alkyl or cycloalkyl may be replaced with a heteroatom group selected from —O—, —S—, and —N(R)— and —CH₃ of the alkyl may be replaced with a heteroatom group selected from —N(R)2, —OR, and —S(R) wherein the heteroatom groups are separated by at least 2 carbon atoms;
each R is independently —H, —(C₁-C₂₀)alkyl, or (C₃-C₆)cycloalkyl wherein one to six —CH₂— groups of the alkyl or cycloalkyl separated by at least two carbon atoms may be replaced with —O—, —S—, or —N(R)—, and —CH₃ of the alkyl may be replaced with a heteroatom group selected from —N(R)₂, —OR, and —S(R) wherein the heteroatom groups are separated by at least 2 carbon atoms; and wherein the alkyl and cycloalkyl may be substituted with one to six halo atoms; and
each R is independently —H, (C₃-C₂₀)cycloalkyl or (C₁-C₂₀)alkyl wherein one to six —CH₂— groups of the alkyl or cycloalkyl separated by at least two carbon atoms may be replaced with —O—, —S—, or —N(R)—, and —CH₃ of the alkyl may be replaced with a heteroatom group selected from —N(R)₂, —OR, and —S(R) wherein the heteroatom groups are separated by at least 2 carbon atoms; and wherein the alkyl and cycloalkyl may be substituted with one to six halo atoms.

[0595] In some embodiments, an APOC3 oligonucleotide comprises an additional component which is or comprises a compound of Formula (M)

[chemical structure]

wherein R is —CN, —CH₂—CN, —C≡CH, —CH₂—N₃, —CH₂—NH₂, —CH₂—N(R)—S(O)₂—R, —CH₂—CO₂H, —CO₂H, —CH₂—OH, —CH₂— SH, —CH═CH—R, —CH₂—R, —CH₂—S—R, —CH₂—N(R)—R, —CH₂—N(R)—C(O)—R, —CH₂—N(R)—C(O)—O—R, —CH₂—N(R)—C(O)—N(R)—R, —CH₂—O—R, —CH₂—O—C(O)—R, —CH₂—O—C(O)—N(R)—R, —CH₂—O—C(O)—O—R, —CH₂—S(O)—R, —CH₂—S(O)₂—R, —CH₂—S(O)₂—N(R)—R, —C(O)—NH₂, —C(O)—O—R, —C(O)—N(R)—R, or aryl or heteroaryl, wherein the aryl or heteroaryl is optionally substituted with R,
or R is —Z—X—Y, —Z—Y, —X—Y, —X, —Y, or —Z—X wherein X is a linker or a drug delivery system, Y is R or is a ligand selected from the group consisting of a small molecule, an amino acid sequence, a nucleic acid sequence, an antibody, an oligomer, a polymer, genetically derived material, a liposome, a nanoparticle, dye, fluorescent probe, or a combination thereof, and Z is —C≡C—, —CH═CH—, —CH₂—, —CH₂—O—, —C(O)—N(R)—, —CH₂—S—, —CH₂—S(O)—, —CH₂—S(O)₂—, —CH₂—S(O)₂—N(R)—, —C(O)—O—, —CH₂—N(R)—, —CH₂—N(R)—C(O)—, —CH₂—N(R)—S(O)2-, —CH₂—N(R)—C(O)—O—, —CH₂—N(R)—C(O)—N(R)—, —CH₂—O—C(O)—, —CH₂—O—C(O)—N(R)—, —CH₂—O—C(O)—O—, or aryl or heteroaryl, wherein the aryl or heteroaryl is optionally substituted with R;
R is —OH, —N₃, —N(R)₂, —N(R)—C(O)—R′—N(R)—C(O)—N(R)_{2′}—N(R)—C(O)—OR, —N(R)—S(O)₂—R′ tetrazole, or triazole, wherein the tetrazole and triazole are optionally substituted with R
and wherein when R is —CH₂—OH, R is —N₃, —N(R)₂, —N(R)—C(O)—R′—N(R)—C(O)—N(R)_{2′}—N(R)—C(O)—OR, N(R)—S(O)₂—R, tetrazole, or triazole, wherein the tetrazole and triazole are optionally substituted with R;
each R is independently —H, —(C₁-C₅)alkyl, halo-substituted (C₁-C₅)alkyl, or (C₃-C₆)cycloalkyl, wherein one or more —CH₂— groups of the alkyl or cycloalkyl may each be replaced with a heteroatom group independently selected from —O—, —S—, and —N(R)— and —CH₃ of the alkyl may be replaced with a heteroatom group selected from —N(R)₂, —OR, and —S(R) wherein the heteroatom groups are separated by at least 2 carbon atoms;
each R is independently —H, —(C₁-C₂₀)alkyl, or (C₃-C₆)cycloalkyl wherein one to six —CH₂— groups of the alkyl or cycloalkyl separated by at least two carbon atoms may each be replaced with a heteroatom independently selected from —O—, —S—, or —N(R)—, and —CH₃ of the alkyl may be replaced with a heteroatom group selected from —N(R)₂, —OR, and —S(R) wherein the heteroatom groups are separated by at least 2 carbon atoms; and wherein the alkyl and cycloalkyl may be substituted with halo atoms;
each R is independently —H, (C₃-C₂₀)cycloalkyl or (C₁-C₆₀)alkyl wherein one to six —CH₂— groups of the cycloalkyl or one to 20—CH₂— groups of the alkyl may each be replaced with heteroatoms independently selected from —O—, —S—, and —N(R)— wherein the heteroatoms are separated by at least two carbon atoms, and —CH₃ of the alkyl may be replaced with a heteroatom group selected from —N(R)2, —OR, and —S(R) wherein the heteroatom groups are separated by at least 2 carbon atoms; and wherein the alkyl and cycloalkyl may be substituted with halo atoms; and
each R is independently H, —C═CH₂, —CH₃, —N₃, —N(R)₂, —OH, —S(O)—(R), —S(O)₂—(R), —C(O)—OH, —S—S-aryl, —S—S-heteroaryl, heterocycyl, aryl or heteroaryl, wherein each aryl or heteroaryl is optionally substituted with R.

[0596] In some embodiments, R⁶¹ or R⁷¹ is —X—Y, and/or R⁶² or R⁷² is —NH—C(O)—CH₃.

[0597] In some embodiments, an APOC3 oligonucleotide comprises an additional component selected from the group consisting of:
[0598] benzyl (4-((2-((1-(1-((1S,2R,3R,4R,5S)-4-acetamido-2,3-dihydroxy-6,8-dioxabicyclo[3.2.1]octan-1-yl)-2,5,8,11-tetraoxatridecan-13-yl)-1H-1,2,3-triazol-4-yl)methoxy)ethyl)amino)-4-oxobutyl)carbamate,
[0599] benzyl (4-((1,3-bis((1-(1-((1S,2R,3R,4R,5S)-4-acetamido-2,3-dihydroxy-6,8-dioxabicyclo[3.2.1]octan-1-yl)-2,5,8,11-tetraoxatridecan-13-yl)-1H-1,2,3-triazol-4-yl)methoxy)propan-2-yl)amino)-4-oxobutyl)carbamate,
[0600] benzyl (4-((1,3-bis((1-(1-((1S,2R,3R,4R,5S)-4-acetamido-2,3-dihydroxy-6,8-dioxabicyclo[3.2.1]octan-1-yl)-2,5,8,11-tetraoxatridecan-13-yl)-1H-1,2,3-triazol-4-yl)methoxy)-2-(((1-(1-((1S,2R,3R,4R,5S)-4-acetamido-2,3-dihydroxy-6,8-dioxabicyclo[3.2.1]octan-1-yl)-2,5,8,11-tetraoxatridecan-13-yl)-1H-1,2,3-triazol-4-yl)methoxy)methyl)propan-2-yl)amino)-4-oxobutyl)carbamate,
[0601] N-(2-((1-(1-((1S,2R,3R,4R,5S)-4-acetamido-2,3-dihydroxy-6,8-dioxabicyclo[3.2.1]octan-1-yl)-2,5,8,11-tetraoxatridecan-13-yl)-1H-1,2,3-triazol-4-yl)methoxy)ethyl)-4-aminobutanamide,
[0602] 4-amino-N-{1,3-bis[(1-{1-[(1S,2R,3R,4R,5S)-4-(acetylamino)-2,3-dihydroxy-6,8-dioxabicyclo[3.2.1]oct-1-yl]-2,5,8,11-tetraoxatridecan-13-yl}-1H-1,2,3-triazol-4-yl)methoxy]propan-2-yl}butanamide,
[0603] 4-amino-N-(1,3-bis[(1-{1-[(1S,2R,3R,4R,5S)-4-(acetylamino)-2,3-dihydroxy-6,8-dioxabicyclo[3.2.1]oct-1-yl]-2,5,8,11-tetraoxatridecan-13-yl}-1H-1,2,3-triazol-4-yl)methoxy]-2-{[(1-{1-[(1S,2R,3R,4R,5 S)-4-(acetylamino)-2,3-dihydroxy-6,8-dioxabicyclo[3.2.1]oct-1-yl]-2,5,8,11-tetraoxatridecan-13-yl}-1H-1,2,3-triazol-4-yl)methoxy]methyl}propan-2-yl)butanamide,
[0604] 4-amino-N-[1,31-bis(1-{[(1S,2R,3R,4R,5S)-4-(acetylamino)-2,3-dihydroxy-6,8-dioxabicyclo[3.2.1]oct-1-yl]methyl}-1H-1,2,3-triazol-4-yl)-2,6,10,14,18,22,26,30-octaoxahentriacontan-16-yl]butanamide,
[0605] 4-amino-N-{1,31-bis(1-{[(1S,2R,3R,4R,5 S)-4-(acetylamino)-2,3-dihydroxy-6,8-dioxabicyclo[3.2.1]oct-1-yl]methyl}-1H-1,2,3-triazol-4-yl)-16-[15-(1-{[(1S,2R,3R,4R,5S)-4-(acetylamino)-2,3-dihydroxy-6,8-dioxabicyclo[3.2.1]oct-1-yl]methyl}-1H-1,2,3-triazol-4-yl)-2,6,10,14-tetraoxapentadec-1-yl]-2,6,10,14,18,22,26,30-octaoxahentriacontan-16-yl}butanamide,
[0606] N-{(1S,2R,3R,4R,5S)-1-[(hexyloxy)methyl]-2,3-dihydroxy-6,8-dioxabicyclo[3.2.1]oct-4-yl}acetamide,
[0607] N-[(1S,2R,3R,4R,5S)-2,3-dihydroxy-1-(2,5,8,11,14-pentaoxapentadec-1-yl)-6,8-dioxabicyclo[3.2.1]oct-4-yl]acetamide,
[0608] N-((1S,2R,3R,4R,5S)-2,3-dihydroxy-1-(hydroxymethyl)-6,8-dioxabicyclo[3.2.1]octan-4-yl)-2,2,2-trifluoroacetamide, compound,
[0609] N-[(1S,2R,3R,4R,5S)-2,3-dihydroxy-1-(hydroxymethyl)-6,8-dioxabicyclo[3.2.1]oct-4-yl]-2,2,2-trifluoroacetamide,
[0610] N-[(1S,2R,3R,4R,5S)-2,3-dihydroxy-1-(hydroxymethyl)-6,8-dioxabicyclo[3.2.1]oct-4-yl]propanamide,
[0611] N-[(1S,2R,3R,4R,5S)-2,3-dihydroxy-1-(hydroxymethyl)-6,8-dioxabicyclo[3.2.1]oct-4-yl]methanesulfonamide,
[0612] N-[(1S,2R,3R,4R,5S)-2,3-dihydroxy-1-(hydroxymethyl)-6,8-dioxabicyclo[3.2.1]oct-4-yl]-2,2-difluoroacetamide,
[0613] N-[(1S,2R,3R,4R,5S)-2,3-dihydroxy-1-(hydroxymethyl)-6,8-dioxabicyclo[3.2.1]oct-4-yl]-3,3,3-trifluoropropanamide,
[0614] N-[(1S,2R,3R,4R,5S)-2,3-dihydroxy-1-(hydroxymethyl)-6,8-dioxabicyclo[3.2.1]oct-4-yl]-N-methylacetamide,
[0615] N-[(1S,2R,3R,4R,5S)-2,3-dihydroxy-1-(hydroxymethyl)-6,8-dioxabicyclo[3.2.1]oct-4-yl]-N-methylmethanesulfonamide,
[0616] tert-butyl [(1S,2R,3R,4R,5S)-2,3-dihydroxy-1-(hydroxymethyl)-6,8-dioxabicyclo[3.2.1]oct-4-yl]methylcarbamate,
[0617] (1S,2R,3R,4R,5S)-1-(hydroxymethyl)-4-(methylamino)-6,8-dioxabicyclo[3.2.1]octane-2,3-diol hydrochloride,
[0618] N-[(1S,2R,3R,4R,5S)-2,3-dihydroxy-1-(15-phenyl-2,5,8,11,14-pentaoxapentadec-1-yl)-6,8-dioxabicyclo[3.2.1]oct-4-yl]acetamide,
[0619] N-[(1S,2R,3R,4R,5S)-1-(13-azido-2,5,8,11-tetraoxatridec-1-yl)-2,3-dihydroxy-6,8-dioxabicyclo[3.2.1]oct-4-yl]acetamide,
[0620] N-[(1S,2R,3R,4R,5S)-2,3-dihydroxy-1-(2,5,8,11-tetraoxatetradec-13-en-1-yl)-6,8-dioxabicyclo[3.2.1]oct-4-yl]acetamide,
[0621] N-[(1S,2R,3R,4R,5S)-2,3-dihydroxy-1-(2,5,8,11-tetraoxatetradec-13-yn-1-yl)-6,8-dioxabicyclo[3.2.1]oct-4-yl]acetamide,
[0622] N-[(1S,2R,3R,4R,5S)-1-(13-amino-2,5,8,11-tetraoxatridec-1-yl)-2,3-dihydroxy-6,8-dioxabicyclo[3.2.1]oct-4-yl]acetamide,
[0623] N-[(1S,2R,3R,4R,5S)-2,3-dihydroxy-1-(13-hydroxy-2,5,8,11-tetraoxatridec-1-yl)-6,8-dioxabicyclo[3.2.1]oct-4-yl]acetamide,
[0624] 1-[(1S,2R,3R,4R,5S)-4-(acetylamino)-2,3-dihydroxy-6,8-dioxabicyclo[3.2.1]oct-1-yl]-2,5,8,11-tetraoxatridecan-13-oic acid,
[0625] S-{1-[(1S,2R,3R,4R,5S)-4-(acetylamino)-2,3-dihydroxy-6,8-dioxabicyclo[3.2.1]oct-1-yl]-2,5,8,11-tetraoxatridecan-13-yl}ethanethioate,
[0626] N-{(1S,2R,3R,4R,5S)-2,3-dihydroxy-1-[13-(pyridin-2-yldisulfanyl)-2,5,8,11-tetraoxatridec-1-yl]-6,8-dioxabicyclo[3.2.1]oct-4-yl}acetamide,
[0627] N-(1,3-bis[(1-{1-[(1S,2R,3R,4R,5S)-4-(acetylamino)-2,3-dihydroxy-6,8-dioxabicyclo[3.2.1]oct-1-yl]-2,5,8,11-tetraoxatridecan-13-yl}-1H-1,2,3-triazol-4-yl)methoxy]-2-{[(1-{1-[(1S,2R,3R,4R,5S)-4-(acetylamino)-2,3-dihydroxy-6,8-dioxabicyclo[3.2.1]oct-1-yl]-2,5,8,11-tetraoxatridecan-13-yl}-1H-1,2,3-triazol-4-yl)methoxy]methyl}propan-2-yl)-6-(pyridin-2-yldisulfanyl)hexanamide,
[0628] N-[(1S,2R,3R,4R,5S)-1-(13-{4-[(3-[(1-{1-[(1S,2R,3R,4R,5S)-4-(acetylamino)-2,3-dihydroxy-6,8-dioxabicyclo[3.2.1]oct-1-yl]-2,5,8,11-tetraoxatridecan-13-yl}-1H-1,2,3-triazol-4-yl)methoxy]-2-[(1-{1-[(1S,2R,3R,4R,5S)-4-(acetylamino)-2,3-dihydroxy-6,8-dioxabicyclo[3.2.1]oct-1-yl]-2,5,8,11-tetraoxatridecan-13-yl}-1H-1,2,3-triazol-4-yl)methoxy]methyl-2-aminopropoxy)methyl]-1H-1,2,3-triazol-1-yl}-2,5,8,11-tetraoxatridec-1-yl)-2,3-dihydroxy-6,8-dioxabicyclo[3.2.1]oct-4-yl]acetamide-hydrochloric acid salt,
[0629] 6-azido-N-(1,3-bis[(1-{1-[(1S,2R,3R,4R,5S)-4-(acetylamino)-2,3-dihydroxy-6,8-dioxabicyclo[3.2.1]oct-1-yl]-2,5,8,11-tetraoxatridecan-13-yl}-1H-1,2,3-triazol-4-yl)methoxy]-2-{[(1-{1-[(1S,2R,3R,4R,5S)-4-(acetylamino)-2,3-dihydroxy-6,8-dioxabicyclo[3.2.1]oct-1-yl]-2,5,8,11-tetraoxatridecan-13-yl}-1H-1,2,3-triazol-4-yl)methoxy]methyl}propan-2-yl)hexanamide,
[0630] N-(1,3-bis[(1-{1-[(1S,2R,3R,4R,5S)-4-(acetylamino)-2,3-dihydroxy-6,8-dioxabicyclo[3.2.1]oct-1-yl]-2,5,8,11-tetraoxatridecan-13-yl}-1H-1,2,3-triazol-4-yl)methoxy]-2-{[(1-{1-[(1S,2R,3R,4R,5S)-4-(acetylamino)-2,3-dihydroxy-6,8-dioxabicyclo[3.2.1]oct-1-yl]-2,5,8,11-tetraoxatridecan-13-yl}-1H-1,2,3-triazol-4-yl)methoxy]methyl}propan-2-yl)hept-6-enamide,
[0631] N-(1,3-bis[(1-{1-[(1S,2R,3R,4R,5S)-4-(acetylamino)-2,3-dihydroxy-6,8-dioxabicyclo[3.2.1]oct-1-yl]-2,5,8,11-tetraoxatridecan-13-yl}-1H-1,2,3-triazol-4-yl)methoxy]-2-{[(1-{1-[(1S,2R,3R,4R,5S)-4-(acetylamino)-2,3-dihydroxy-6,8-dioxabicyclo[3.2.1]oct-1-yl]-2,5,8,11-tetraoxatridecan-13-yl}-1H-1,2,3-triazol-4-yl)methoxy]methyl}propan-2-yl)hept-6-ynamide,
[0632] 7-[(1,3-bis[(1-{1-[(1S,2R,3R,4R,5S)-4-(acetylamino)-2,3-dihydroxy-6,8-dioxabicyclo[3.2.1]oct-1-yl]-2,5,8,11-tetraoxatridecan-13-yl}-1H-1,2,3-triazol-4-yl)methoxy]-2-{[(1-{1-[(1S,2R,3R,4R,5S)-4-(acetylamino)-2,3-dihydroxy-6,8-dioxabicyclo[3.2.1]oct-1-yl]-2,5,8,11-tetraoxatridecan-13-yl}-1H-1,2,3-triazol-4-yl)methoxy]methyl}propan-2-yl)amino]-7-oxoheptanoic acid (Sodium salt),
[0633] benzyl {6-[(1,3-bis[(1-{1-[(1S,2R,3R,4R,5S)-4-(acetylamino)-2,3-dihydroxy-6,8-dioxabicyclo[3.2.1]oct-1-yl]-2,5,8,11-tetraoxatridecan-13-yl}-1H-1,2,3-triazol-4-yl)methoxy]-2-{[(1-{1-[(1S,2R,3R,4R,5S)-4-(acetylamino)-2,3-dihydroxy-6,8-dioxabicyclo[3.2.1]oct-1-yl]-2,5,8,11-tetraoxatridecan-13-yl}-1H-1,2,3-triazol-4-yl)methoxy]methyl}propan-2-yl)amino]-6-oxohexyl}carbamate,
[0634] 6-amino-N-(1,3-bis[(1-{1-[(1S,2R,3R,4R,5S)-4-(acetylamino)-2,3-dihydroxy-6,8-dioxabicyclo[3.2.1]oct-1-yl]-2,5,8,11-tetraoxatridecan-13-yl}-1H-1,2,3-triazol-4-yl)methoxy]-2-{[(1-{1-[(1S,2R,3R,4R,5S)-4-(acetylamino)-2,3-dihydroxy-6,8-dioxabicyclo[3.2.1]oct-1-yl]-2,5,8,11-tetraoxatridecan-13-yl}-1H-1,2,3-triazol-4-yl)methoxy]methyl}propan-2-yl)hexanamide acetate salt,
[0635] N-{6-[(1,3-bis[(1-{1-[(1S,2R,3R,4R,5S)-4-(acetylamino)-2,3-dihydroxy-6,8-dioxabicyclo[3.2.1]oct-1-yl]-2,5,8,11-tetraoxatridecan-13-yl}-1H-1,2,3-triazol-4-yl)methoxy]-2-{[(1-{1-[(1S,2R,3R,4R,5S)-4-(acetylamino)-2,3-dihydroxy-6,8-dioxabicyclo[3.2.1]oct-1-yl]-2,5,8,11-tetraoxatridecan-13-yl}-1H-1,2,3-triazol-4-yl)methoxy]methyl}propan-2-yl)amino]-6-oxohexyl}-6-(2,5-dioxo-2,5-dihydro-1H-pyrrol-1-yl)hexanamide,
[0636] N-{6-[(1,3-bis[(1-{1-[(1S,2R,3R,4R,5S)-4-(acetylamino)-2,3-dihydroxy-6,8-dioxabicyclo[3.2.1]oct-1-yl]-2,5,8,11-tetraoxatridecan-13-yl}-1H-1,2,3-triazol-4-yl)methoxy]-2-[(1-{1-[(1S,2R,3R,4R,5S)-4-(acetylamino)-2,3-dihydroxy-6,8-dioxabicyclo[3.2.1]oct-1-yl]-2,5,8,11-tetraoxatridecan-13-yl}-1H-1,2,3-triazol-4-yl)methoxy]methyl}propan-2-yl)amino]-6-oxohexyl-6-[(bromoacetyl)amino]hexanamide,
[0637] 4-{[(2R)-5-(carbamoylamino)-2-{[(2R)-2-cyclopentyl-2-{[6-(2,5-dioxo-2,5-dihydro-1H-pyrrol-1-yl)hexanoyl]amino}acetyl]amino}pentanoyl]amino}benzyl {6-[(1,3-bis[(1-{1-[(1S,2R,3R,4R,5S)-4-(acetylamino)-2,3-dihydroxy-6,8-dioxabicyclo[3.2.1]oct-1-yl]-2,5,8,11-tetraoxatridecan-13-yl}-1H-1,2,3-triazol-4-yl)methoxy]-2-{[(1-{1-[(1S,2R,3R,4R,5S)-4-(acetylamino)-2,3-dihydroxy-6,8-dioxabicyclo[3.2.1]oct-1-yl]-2,5,8,11-tetraoxatridecan-13-yl}-1H-1,2,3-triazol-4-yl)methoxy]methyl}propan-2-yl)amino]-6-oxohexyl}carbamate,
[0638] N-(1,3-bis[(1-{1-[(1S,2R,3R,4R,5S)-4-(acetylamino)-2,3-dihydroxy-6,8-dioxabicyclo[3.2.1]oct-1-yl]-2,5,8,11-tetraoxatridecan-13-yl}-1H-1,2,3-triazol-4-yl)methoxy]-2-{[(1-{1-[(1S,2R,3R,4R,5S)-4-(acetylamino)-2,3-dihydroxy-6,8-dioxabicyclo[3.2.1]oct-1-yl]-2,5,8,11-tetraoxatridecan-13-yl}-1H-1,2,3-triazol-4-yl)methoxy]methyl}propan-2-yl)-3,19-dioxo-1-(pyridin-2-yldisulfanyl)-7,10,13,16-tetraoxa-4,20-diazahexacosan-26-amide,
[0639] N-(1,3-bis[(1-{1-[(1S,2R,3R,4R,5S)-4-(acetylamino)-2,3-dihydroxy-6,8-dioxabicyclo[3.2.1]oct-1-yl]-2,5,8,11-tetraoxatridecan-13-yl}-1H-1,2,3-triazol-4-yl)methoxy]-2-{[(1-{1-[(1S,2R,3R,4R,5S)-4-(acetylamino)-2,3-dihydroxy-6,8-dioxabicyclo[3.2.1]oct-1-yl]-2,5,8,11-tetraoxatridecan-13-yl}-1H-1,2,3-triazol-4-yl)methoxy]methyl}propan-2-yl)-3,31-dioxo-1-(pyridin-2-yldisulfanyl)-7,10,13,16,19,22,25,28-octaoxa-4,32-diazaoctatriacontan-38-amide,
[0640] N-{6-[(1,3-bis[(1-{1-[(1S,2R,3R,4R,5S)-4-(acetylamino)-2,3-dihydroxy-6,8-dioxabicyclo[3.2.1]oct-1-yl]-2,5,8,11-tetraoxatridecan-13-yl}-1H-1,2,3-triazol-4-yl)methoxy]-2-{[(1-{1-[(1S,2R,3R,4R,5S)-4-(acetylamino)-2,3-dihydroxy-6,8-dioxabicyclo[3.2.1]oct-1-yl]-2,5,8,11-tetraoxatridecan-13-yl}-1H-1,2,3-triazol-4-yl)methoxy]methyl}propan-2-yl)amino]-6-oxohexyl}-6-(pyridin-2-yldisulfanyl)hexanamide,
[0641] 2-(pyridin-2-yldisulfanyl)ethyl {6-[(1,3-bis[(1-{1-[(1S,2R,3R,4R,5S)-4-(acetylamino)-2,3-dihydroxy-6,8-dioxabicyclo[3.2.1]oct-1-yl]-2,5,8,11-tetraoxatridecan-13-yl}-1H-1,2,3-triazol-4-yl)methoxy]-2-{[(1-{1-[(1S,2R,3R,4R,5S)-4-(acetylamino)-2,3-dihydroxy-6,8-dioxabicyclo[3.2.1]oct-1-yl]-2,5,8,11-tetraoxatridecan-13-yl}-1H-1,2,3-triazol-4-yl)methoxy]methyl}propan-2-yl)amino]-6-oxohexyl}carbamate,
[0642] N-{6-[(1,3-bis[(1-{1-[(1S,2R,3R,4R,5S)-4-(acetylamino)-2,3-dihydroxy-6,8-dioxabicyclo[3.2.1]oct-1-yl]-2,5,8,11-tetraoxatridecan-13-yl}-1H-1,2,3-triazol-4-yl)methoxy]-2-{[(1-{1-[(1S,2R,3R,4R,5S)-4-(acetylamino)-2,3-dihydroxy-6,8-dioxabicyclo[3.2.1]oct-1-yl]-2,5,8,11-tetraoxatridecan-13-yl}-1H-1,2,3-triazol-4-yl)methoxy]methyl}propan-2-yl)amino]-6-oxohexyl}-6-(4,4,5,5-tetramethyl-1,3,2-dioxaborolan-2-yl)hexanamide,
[0643] N-{6-[(1,3-bis[(1-{1-[(1S,2R,3R,4R,5S)-4-(acetylamino)-2,3-dihydroxy-6,8-dioxabicyclo[3.2.1]oct-1-yl]-2,5,8,11-tetraoxatridecan-13-yl}-1H-1,2,3-triazol-4-yl)methoxy]-2-{[(1-{1-[(1S,2R,3R,4R,5S)-4-(acetylamino)-2,3-dihydroxy-6,8-dioxabicyclo[3.2.1]oct-1-yl]-2,5,8,11-tetraoxatridecan-13-yl}-1H-1,2,3-triazol-4-yl)methoxy]methyl}propan-2-yl)amino]-6-oxohexyl}-N-(1,3-dihydroxypropan-2-yl)heptanediamide,
[0644] 6-azido-N-{6-[(1,3-bis[(1-{1-[(1S,2R,3R,4R,5S)-4-(acetylamino)-2,3-dihydroxy-6,8-dioxabicyclo[3.2.1]oct-1-yl]-2,5,8,11-tetraoxatridecan-13-yl}-1H-1,2,3-triazol-4-yl)methoxy]-2-{[(1-{1-[(1S,2R,3R,4R,5S)-4-(acetylamino)-2,3-dihydroxy-6,8-dioxabicyclo[3.2.1]oct-1-yl]-2,5,8,11-tetraoxatridecan-13-yl}-1H-1,2,3-triazol-4-yl)methoxy]methyl}propan-2-yl)amino]-6-oxohexyl}hexanamide,
[0645] 6-(benzyloxy)-N-{6-[(1,3-bis[(1-{1-[(1S,2R,3R,4R,5S)-4-(acetylamino)-2,3-dihydroxy-6,8-dioxabicyclo[3.2.1]oct-1-yl]-2,5,8,11-tetraoxatridecan-13-yl}-1H-1,2,3-triazol-4-yl)methoxy]-2-{[(1-{1-[(1S,2R,3R,4R,5S)-4-(acetylamino)-2,3-dihydroxy-6,8-dioxabicyclo[3.2.1]oct-1-yl]-2,5,8,11-tetraoxatridecan-13-yl}-1H-1,2,3-triazol-4-yl)methoxy]methyl}propan-2-yl)amino]-6-oxohexyl}hexanamide,
[0646] (1S,2R,3R,4R,5S)-4-(acetylamino)-1-{13-[4-({3-[(1-{1-[(1S,2R,3R,4R,5S)-4-(acetylamino)-2,3-bis(acetyloxy)-6,8-dioxabicyclo[3.2.1]oct-1-yl]-2,5,8,11-tetraoxatridecan-13-yl}-1H-1,2,3-triazol-4-yl)methoxy]-2-{[(1-{1-[(1S,2R,3R,4R,5S)-4-(acetylamino)-2,3-bis(acetyloxy)-6,8-dioxabicyclo[3.2.1]oct-1-yl]-2,5,8,11-tetraoxatridecan-13-yl}-1H-1,2,3-triazol-4-yl)methoxy]methyl}-2-({6 [(6hydroxyhexanoyl)amino]hexanoyl}amino)propoxy}methyl)-1H-1,2,3-triazol-1-yl]-2,5,8,11-tetraoxatridec-1-yl}-3-(acetyloxy)-6,8-dioxabicyclo[3.2.1]oct-2-yl acetate,
[0647] benzyl [6-({6-[(1,3-bis[(1-{1-[(1S,2R,3R,4R,5S)-4-(acetylamino)-2,3-dihydroxy-6,8-dioxabicyclo[3.2.1]oct-1-yl]-2,5,8,11-tetraoxatridecan-13-yl}-1H-1,2,3-triazol-4-yl)methoxy]-2-{[(1-{1-[(1S,2R,3R,4R,5S)-4-(acetylamino)-2,3-dihydroxy-6,8-dioxabicyclo[3.2.1]oct-1-yl]-2,5,8,11-tetraoxatridecan-13-yl}-1H-1,2,3-triazol-4-yl)methoxy]methyl}propan-2-yl)amino]-6-oxohexyl}amino)-6-oxohexyl]carbamate,
[0648] 6-amino-N-{6-[(1,3-bis[(1-{1-[(1S,2R,3R,4R,5S)-4-(acetylamino)-2,3-dihydroxy-6,8-dioxabicyclo[3.2.1]oct-1-yl]-2,5,8,11-tetraoxatridecan-13-yl}-1H-1,2,3-triazol-4-yl)methoxy]-2-{[(1-{1-[(1S,2R,3R,4R,5S)-4-(acetylamino)-2,3-dihydroxy-6,8-dioxabicyclo[3.2.1]oct-1-yl]-2,5,8,11-tetraoxatridecan-13-yl}-1H-1,2,3-triazol-4-yl)methoxy]methyl}propan-2-yl)amino]-6-oxohexyl}hexanamide acetate,
[0649] 4-(benzyloxy)-N-(1,3-bis[(1-{1-[(1S,2R,3R,4R,5S)-4-amino-2,3-dihydroxy-6,8-dioxabicyclo[3.2.1]oct-1-yl]-2,5,8,11-tetraoxatridecan-13-yl}-1H-1,2,3-triazol-4-yl)methoxy]-2-{[(1-{1-[(1S,2R,3R,4R,5S)-4-amino-2,3-dihydroxy-6,8-dioxabicyclo[3.2.1]oct-1-yl]-2,5,8,11-tetraoxatridecan-13-yl}-1H-1,2,3-triazol-4-yl)methoxy]methyl}propan-2-yl)butanamide,
[0650] N-(1,3-bis[(1-{1-[(1S,2R,3R,4R,5S)-4-(acetylamino)-2,3-dihydroxy-6,8-dioxabicyclo[3.2.1]oct-1-yl]-2,5,8,11-tetraoxatridecan-13-yl}-1H-1,2,3-triazol-4-yl)methoxy]-2-{[(1-{1-[(1S,2R,3R,4R,5S)-4-(acetylamino)-2,3-dihydroxy-6,8-dioxabicyclo[3.2.1]oct-1-yl]-2,5,8,11-tetraoxatridecan-13-yl}-1H-1,2,3-triazol-4-yl)methoxy]methyl}propan-2-yl)-4-hydroxybutanamide, and
[0651] N-(2-{[6-({6-[(1,3-bis[(1-{1-[(1S,2R,3R,4R,5S)-4-(acetylamino)-2,3-dihydroxy-6,8-dioxabicyclo[3.2.1]oct-1-yl]-2,5,8,11-tetraoxatridecan-13-yl}-1H-1,2,3-triazol-4-yl)methoxy]-2-{[(1-{1-[(1S,2R,3R,4R,5S)-4-(acetylamino)-2,3-dihydroxy-6,8-dioxabicyclo[3.2.1]oct-1-yl]-2,5,8,11-tetraoxatridecan-13-yl}-1H-1,2,3-triazol-4-yl)methoxy]methyl}propan-2-yl)amino]-6-oxohexyl}amino)-6-oxohexyl]oxy}-1,3-dioxan-5-yl)-6-(pyridin-2-yldisulfanyl)hexanamide

[0652] In some embodiments, an APOC3 oligonucleotide comprises an additional component of Formula (N)

[chemical structure]

[0653] In some embodiments, an APOC3 oligonucleotide comprises an additional component selected from:

[chemical structure]

[0654] In some embodiments, an APOC3 oligonucleotide comprises an additional component selected from any of the following formulae:

[chemical structure]

[chemical structure]

[chemical structure]

[chemical structure]

[chemical structure]

[0655] In some embodiments, the present disclosure pertains to: a compound having the Formula O1:

Y¹-L¹-(Z¹⁰)_{za} O1

[0656] or a pharmaceutically acceptable salt of said compound wherein Y¹ is an oligonucleotide targeting APOC3;

[0657] za is 1, 2, or 3; and

[0658] L¹ is a compound of Formula L11, L12, L13, L43, L44, L45, L46, L47, L48, L49, L50, L51, L52, L53 or L54 wherein the connection sites with Y¹ and Z¹⁰ are indicated:

[chemical structure]

[chemical structure]

[chemical structure]

[0659] wherein each T¹ is independently absent or is alkylene, alkenylene, or alkynylene, wherein one or more —CH₂— groups of the alkylene, alkenylene, or alkynylene may each independently be replaced with a heteroatom group independently selected from —O—, —S—, and —N(R⁴⁹)— wherein the heteroatom groups are separated by at least 2 carbon atoms;

[0660] each Q¹ is independently absent or is —C(O)—, —C(O)—NR⁴⁹—, —NR⁴⁹—C(O)—, —O—C(O)—NR⁴⁹—, —NR⁴⁹—C(O)—O—, —CH₂—, —NR⁴⁹C(O)NR⁴⁹—, a bivalent heteroaryl group, or a heteroatom group selected from —O—, —S—, —S—S—, —S(O)—, —S(O)₂—, and —NR⁴⁹—, wherein at least two carbon atoms separate the heteroatom groups —O—, —S—, —S—S—, —S(O)—, —S(O)₂— and —NR⁴⁹— from any other heteroatom group, or a structure of the formula:

[chemical structure]

[0661] wherein R⁵³ is —O or —NH—, and R⁵⁴ is —O or —S;

[0662] each R⁴⁹ is independently —H, —(C₁-C₂₀)alkyl, or —(C₃-C₆)cycloalkyl wherein one to six —CH₂— groups of the alkyl or cycloalkyl separated by at least two carbon atoms may be replaced with —O—, —S—, or —N(R^{49a})—, and —CH₃ of the alkyl may be replaced with a heteroatom group selected from —N(R^{49a})₂, —OR^{49a}, and —S(R^{49a}) wherein the heteroatom groups are separated by at least 2 carbon atoms; and wherein the alkyl and cycloalkyl may be substituted with halo atoms and wherein each R^{49a} is independently —H, —(C₁-C₆)alkyl, or —(C₃-C₆)cycloalkyl;

[0663] R⁵³ is —O or —NH;

[0664] R⁵⁴ is —O or —S;

[0665] each n is independently 0, 1, 2, 3, 4, 5, 6, 7, 8, 9, 10, 11, 12, 13, 14, 15, 16, 17, 18, 19, 20, 21, 22, 23, 24, 25, 26, 27, 28, 29, 30, 31, 32, 33, 34, 35, 36, 37, 38, 39, or 40; wherein if n is greater than 0, each T¹ and each Q¹ of each (T¹-Q¹-T¹-Q¹) is independently selected; and

[0666] each Z¹⁰ is independently a compound of Formula Z12, Z13, Z14, Z15, Z16, Z17, Z18, Z19, Z20, or Z21, or a geometrical or position isomer thereof, wherein the connection site with L¹ is indicated:

[chemical structure]

[0667] wherein each R⁴⁶ is independently —CN, —CH₂—CN, —C≡CH, —CH₂—N₃, —CH₂—NH₂, —CH₂—N(R⁵²)—S(O)₂—R⁵¹, —CH₂—CO₂H, —CO₂H, —CH₂—OH, —CH₂—SH, —CH═CH—R⁵¹, —CH₂—R⁵¹, —CH₂—S—R⁵¹, —CH₂—N(R⁵²)—R⁵¹, —CH₂—N(R⁵²)—C(O)—R⁵¹, —CH₂—N(R⁵²)—C(O)—O—R⁵¹, —CH₂—N(R⁵²)—C(O)—N(R⁵²)—R⁵¹, —CH₂—O-R⁵¹, —CH₂—O—C(O)—R ⁵¹, —CH₂—O—C(O)—N(R⁵²)—R⁵¹, —CH₂—O—C(O)—O—R⁵¹, —CH₂—S(O)—R⁵¹, —CH₂—S(O)₂—R⁵¹, —CH₂—S(O)₂—N(R⁵²)—R⁵¹, —C(O)—NH₂, —C(O)—O—R⁵¹, —C(O)—N(R⁵²)—R⁵¹, or aryl or heteroaryl, wherein the aryl or heteroaryl is optionally substituted with R⁵¹

[0668] each R⁴⁷ is independently —OH, —N3, —N(R⁴⁸)₂, —N(R⁴⁸)—C(O)—R⁴⁸, —N(R⁴⁸)—C(O)—N(R⁴⁸)₂, —N(R⁴⁸)—C(O)—OR⁴⁸, —N(R⁴⁸)—S(O)₂—R⁴⁸, tetrazole, or triazole, wherein the tetrazole and triazole are optionally substituted with R⁴⁸;

[0669] each R⁴⁸ is independently —H, —(C₁-C₅)alkyl, halo-substituted (C₁-C₅)alkyl, halo substituted —(C₃-C₆)cycloalkyl, —(C₁-C₅)alkenyl, —(C₁-C₅)alkynyl, halo substituted —(C₁-C₅)alkenyl, halo substituted —(C₁-C₅)alkynyl, or —(C₃-C₆)cycloalkyl, wherein a —CH₂— group of the alkyl or cycloalkyl may each be independently replaced with a heteroatom group selected from —O—, —S—, and —N(R⁵²)— and —CH₃ of the alkyl may each be independently replaced with a heteroatom group selected from —N(R⁵²)₂, —OR⁵², and —S(R⁵²) wherein the heteroatom groups are separated by at least 2 carbon atoms;

[0670] each R⁵¹ is independently —H, —(C₃-C₂₀)cycloalkyl, —(C₁-C₆₀)alkenyl, —(C₁-C₆₀)alkynyl, or —(C₁-C₆₀)alkyl wherein one to six —CH₂— groups of the cycloalkyl or one to 20—CH₂— groups of the alkyl may each be independently replaced with heteroatoms independently selected from —O—, —S—, and —N(R⁴⁹)— wherein the heteroatoms are separated by at least two carbon atoms, and —CH₃ of the alkyl may each be independently replaced with a heteroatom group selected from —N(R⁴⁹)₂, —OR⁴⁹, and —S(R⁴⁹) wherein the heteroatom groups are separated by at least 2 carbon atoms, and wherein the alkyl, alkenyl, alkynyl, and cycloalkyl may be substituted with halo atoms; and

[0671] each R⁵² is independently —H, —(C₁-C₂₀)alkyl, —(C₁-C₂₀)alkenyl, —(C₁-C₂₀)alkynyl, or —(C₃-C₆)cycloalkyl wherein one to six —CH₂— groups of the alkyl or cycloalkyl separated by at least two carbon atoms may each be independently replaced with a heteroatom independently selected from —O—, —S—, or —N(R⁴⁹)—, and —CH₃ of the alkyl may each be independently replaced with a heteroatom group selected from —N(R⁴⁹)₂, —OR⁴⁹, and —S(R⁴⁹) wherein the heteroatom groups are separated by at least 2 carbon atoms; and wherein the alkyl, alkenyl, alkynyl, and cycloalkyl may be substituted with halo atoms.

[0672] In some embodiments, Y¹ comprises at least 15 bases.

[0673] In some embodiments, the base sequence of Y¹ comprises or is the base sequence of any APOC3 oligonucleotide listed in Table 1A, or the base sequence of Y¹ comprises 15 contiguous bases of the sequence of any APOC3 oligonucleotide listed in Table 1A.

[0674] In some embodiments, Y¹ comprises at least 1 phosphodiester internucleotidic linkage.

[0675] In some embodiments, Y¹ comprises at least 1 chirally controlled modified internucleotidic linkage.

[0676] In some embodiments, Y¹ comprises at least 1 chirally controlled modified internucleotidic linkage which is a chirally controlled phosphorothioate.

[0677] In some embodiments, Y¹ comprises at least 1 chirally controlled modified internucleotidic linkage which is a chirally controlled phosphorothioate in the Sp configuration.

[0678] In some embodiments, Y¹ comprises at least 1 chirally controlled modified internucleotidic linkage which is a chirally controlled phosphorothioate in the Rp configuration.

[0679] In some embodiments, Y¹, wherein the chirally controlled modified internucleotidic linkage or chirally controlled phosphorothioate comprises a phosphorus chiral center which has a diastereopurity of at least 70% within the composition.

[0680] In some embodiments, Y¹, wherein the chirally controlled modified internucleotidic linkage or chirally controlled phosphorothioate comprises a phosphorus chiral center which has a diastereopurity of at least 70%, 75%, 80%, 85%, 90%, 91%, 92%, 93%, 94%, 95%, 96%, 97%, 98%, 99% or 99.5%.

[0681] In some embodiments, Y¹ comprises at least 1 sugar modification.

[0682] In some embodiments, Y¹ comprises at least 1 base modification.

[0683] In some embodiments, Y¹ further comprises a pattern of backbone linkages.

[0684] In some embodiments, Y¹ further comprises a pattern of backbone chiral centers.

[0685] In some embodiments, Y¹ further comprises a pattern of chemical modifications.

[0686] In some embodiments, Y¹ further comprises a pattern of backbone linkages, a pattern of backbone chiral centers, and a pattern of chemical modifications.

[0687] In some embodiments, the pattern of backbone linkages, the pattern of backbone chiral centers, and the pattern of chemical modifications of the oligonucleotide are the pattern of backbone linkages, the pattern of backbone chiral centers, and/or the pattern of chemical modifications of the oligonucleotide of any oligonucleotide listed in Table 1A.

[0688] In some embodiments, the pattern of backbone linkages, the pattern of backbone chiral centers, and the pattern of chemical modifications of the oligonucleotide are the pattern of backbone linkages, the pattern of backbone chiral centers, and/or the pattern of chemical modifications of the oligonucleotide of an oligonucleotide listed in Table 1A the base sequence of Y¹ comprises or is the base sequence of any APOC3 oligonucleotide listed in Table 1A, or the base sequence of Y¹ comprises 15 contiguous bases of the sequence of any APOC3 oligonucleotide listed in Table 1A.

[0689] In some embodiments, the oligonucleotide is capable of mediating a decrease in the expression, level and/or activity of an APOC3 target gene or a gene product thereof.

[0690] In some embodiments, the oligonucleotide is capable of mediating a decrease in the expression, level and/or activity of an APOC3 target gene or a gene product thereof via a mechanism mediated by RNaseH, steric hindrance and/or RNA interference.

[0691] In some embodiments:

[0692] each T¹ is independently absent or is alkylene, wherein one or more —CH₂— groups of the alkylene, may each independently be replaced with a heteroatom group independently selected from —O—, and —N(R⁴⁹)— wherein the heteroatom groups are separated by at least 2 carbon atoms;

[0693] each Q¹ is independently absent or is —C(O), —C(O)—NR⁴⁹, —NR⁴⁹—C(O), or a heteroatom group selected from —O—, and —NR⁴⁹, wherein at least two carbon atoms separate the heteroatom groups —O— and —NR⁴⁹ from any other heteroatom group;

[0694] each R⁴⁹ is independently —H, —(C₁-C₆)alkyl, or —(C₃-C₆)cycloalkyl wherein the alkyl and cycloalkyl may be substituted with halo atoms;

[0695] each n is independently 0, 1, 2, 3 or 4; wherein if n is greater than 0, each T¹ and each Q¹ of each (T¹-Q¹-T¹-Q¹) is independently selected;

[0696] each R⁴⁶ is —CH₂—OH;

[0697] each R⁴⁷ is —N(R⁴⁸)—C(O)—R⁴⁸; and

[0698] each R⁴⁸ is independently —H, or —(C₁-C₅)alkyl.

[0699] In some embodiments, the present disclosure pertains to: a compound having the Formula O2:

Y¹-L²-(Z¹¹)_{za} O2

[0700] or a pharmaceutically acceptable salt thereof wherein Y¹ is an oligonucleotide targets APOC3;

[0701] za is 1, 2, or 3;

[0702] L² is a linking group; and

[0703] Z¹¹ is a compound of Formula (B), wherein connection site with L² is indicated:

[chemical structure]

[0704] each R⁴⁷ is independently —OH, —N₃, —N(R⁴⁸)₂, —N(R⁴⁸)—C(O)—R⁴⁸, —N(R⁴⁸)—C(O)—N(R⁴⁸)₂, —N(R⁴⁸)—C(O)—OR⁴⁸, —N(R⁴⁸)—S(O)₂—R⁴⁸, tetrazole, or triazole, wherein the tetrazole and triazole are) optionally substituted with R⁴⁸;

[0705] each R⁴⁸ is independently —H, —(C₁-C₅)alkyl, halo-substituted —(C₁-C₅)alkyl, halo substituted —(C₃-C₆)cycloalkyl, —(C₁-C₅)alkenyl, —(C₁-C₅)alkynyl, halo substituted —(C₁-C₅)alkenyl, halo substituted —(C₁-C₅)alkynyl, or —(C₃-C₆)cycloalkyl, wherein a —CH₂— group of the alkyl or cycloalkyl may each be independently replaced with a heteroatom group selected from —O—, —S—, and —N(R⁵²)— and —CH₃ of the alkyl may each be independently replaced with a heteroatom group selected from —N(R⁵²)₂, —OR⁵², and —S(R⁵²) wherein the heteroatom groups are separated by at least 2 carbon atoms;

[0706] each R⁴⁹ is independently —H, —(C₁-C₂₀)alkyl, or —(C₃-C₆)cycloalkyl wherein one to six —CH₂— groups of the alkyl or cycloalkyl separated by at least two carbon atoms may be replaced with —O—, —S—, or —N(R^{49a})—, and —CH₃ of the alkyl may be replaced with a heteroatom group selected from —N(R^{49a})2, —OR^{49a}, and —S(R^{49a}) wherein the heteroatom groups are separated by at least 2 carbon atoms; and wherein the alkyl and cycloalkyl may be substituted with halo atoms and wherein each R^{49a} is independently —H, —(C₁-C₆)alkyl, or —(C₃-C₆)cycloalkyl;

[0707] each R⁵² is independently —H, —(C₁-C₂₀)alkyl, —(C₁-C₂₀)alkenyl, —(C₁-C₂₀)alkynyl, or —(C₃-C₆)cycloalkyl wherein one to six —CH₂— groups of the alkyl or cycloalkyl separated by at least two carbon atoms may each be independently replaced with a heteroatom independently selected from —O—, —S—, or —N(R⁴⁹)—, and —CH₃ of the alkyl may each be independently replaced with a heteroatom group selected from —N(R⁴⁹)₂, —OR⁴⁹, and —S(R⁴⁹) wherein the heteroatom groups are separated by at least 2 carbon atoms; and wherein the alkyl, alkenyl, alkynyl, and cycloalkyl may be substituted with halo atoms.

[0708] In some embodiments, L² is a compound of Formula L1, L2, L3, L4, L5, L6, L7, L8, L9, L10, L11, L12, L13 or L14, wherein connection sites with Y¹ and Z¹¹ are indicated:

[chemical structure]

[chemical structure]

[0709] wherein each T¹ is independently absent or is alkylene, alkenylene, or alkynylene, wherein one or more —CH₂— groups of the alkylene, alkenylene, or alkynylene may each independently be replaced with a heteroatom group independently selected from —O—, —S—, and —N(R⁴⁹)— wherein the heteroatom groups are separated by at least 2 carbon atoms;

[0710] each Q¹ is independently absent or is —C(O)—, —C(O)—NR⁴⁹—, —O—C(O)—NR⁴⁹—, —NR⁴⁹—C(O)—O—, —CH₂—, —NR⁴⁹C(O)NR⁴⁹—, a bivalent heteroaryl group, or a heteroatom group selected from —O—, —S—, —S—S—, —S(O)—, —S(O)2-, and —NR⁴⁹—, wherein at least two carbon atoms separate the heteroatom groups —O—, —S—, —S—S—, —S(O)—, —S(O)2- and —NR⁴⁹— from any other heteroatom group, or a structure of the formula:

[chemical structure]

[0711] wherein R⁵³ is —O or —NH, and R⁵⁴ is —O or —S;

[0712] each R⁴⁹ is independently —H, —(C₁-C₂₀)alkyl, or —(C₃-C₆)cycloalkyl wherein one to six —CH₂— groups of the alkyl or cycloalkyl separated by at least two carbon atoms may be replaced with —O—, —S—, or —N(R^{49a})—, and —CH₃ of the alkyl may be replaced with a heteroatom group selected from —N(R^{49a})2, —OR^{49a}, and —S(R^{49a}) wherein the heteroatom groups are separated by at least 2 carbon atoms; and wherein the alkyl and cycloalkyl may be substituted with halo atoms; and wherein each R^{49a} is independently —H, —(C₁-C₆)alkyl, or —(C₃-C₆)cycloalkyl;

[0713] R⁵³ is —O or —NH;

[0714] R⁵⁴ is —O or —S; and

[0715] each n is independently 0, 1, 2, 3, 4, 5, 6, 7, 8, 9, 10,11,12,13,14, 15, 16, 17, 18, 19, 20, 21, 22, 23, 24, 25, 26, 27, 28, 29, 30, 31, 32, 33, 34, 35, 36, 37, 38, 39, or 40; wherein if n is greater than 0, each T¹ and each Q¹ of each (T¹-Q¹-T¹-Q¹) is independently selected.

[0716] In some embodiments, Y¹ comprises at least 15 bases.

[0717] In some embodiments, the base sequence of Y¹ comprises or is the base sequence of any APOC3 oligonucleotide listed in Table 1A, or the base sequence of Y¹ comprises 15 contiguous bases of the sequence of any APOC3 oligonucleotide listed in Table 1A.

[0718] In some embodiments, Y¹ comprises at least 1 phosphodiester internucleotidic linkage.

[0719] In some embodiments, Y¹ comprises at least 1 chirally controlled modified internucleotidic linkage.

[0720] In some embodiments, Y¹ comprises at least 1 chirally controlled modified internucleotidic linkage which is a chirally controlled phosphorothioate.

[0721] In some embodiments, Y¹ comprises at least 1 chirally controlled modified internucleotidic linkage which is a chirally controlled phosphorothioate in the Sp configuration.

[0722] In some embodiments, Y¹ comprises at least 1 chirally controlled modified internucleotidic linkage which is a chirally controlled phosphorothioate in the Rp configuration.

[0723] In some embodiments, Y¹, wherein the chirally controlled modified internucleotidic linkage or chirally controlled phosphorothioate comprises a phosphorus chiral center which has a diastereopurity of at least 70% within the composition.

[0724] In some embodiments, Y¹, wherein the chirally controlled modified internucleotidic linkage or chirally controlled phosphorothioate comprises a phosphorus chiral center which has a diastereopurity of at least 70%, 75%, 80%, 85%, 90%, 91%, 92%, 93%, 94%, 95%, 96%, 97%, 98%, 99% or 99.5%.

[0725] In some embodiments, Y¹ comprises at least 1 sugar modification.

[0726] In some embodiments, Y¹ comprises at least 1 base modification.

[0727] In some embodiments, the pattern of backbone linkages of the oligonucleotide is the pattern of backbone linkages of any oligonucleotide listed in Table 1A.

[0728] In some embodiments, the pattern of backbone chiral centers of the oligonucleotide is the pattern of backbone chiral centers of any oligonucleotide listed in Table 1A.

[0729] In some embodiments, the pattern of chemical modifications of the oligonucleotide is the pattern of chemical modifications of any oligonucleotide listed in Table 1A.

[0730] In some embodiments, the pattern of backbone linkages, the pattern of backbone chiral centers, and/or the pattern of chemical modifications of the oligonucleotide are the pattern of backbone linkages, the pattern of backbone chiral centers, and/or the pattern of chemical modifications of the oligonucleotide of any oligonucleotide listed in Table 1A.

[0731] In some embodiments, the pattern of backbone linkages, the pattern of backbone chiral centers, and the pattern of chemical modifications of the oligonucleotide are the pattern of backbone linkages, the pattern of backbone chiral centers, and/or the pattern of chemical modifications of the oligonucleotide of any oligonucleotide listed in Table 1A.

[0732] In some embodiments, the pattern of backbone linkages, the pattern of backbone chiral centers, and the pattern of chemical modifications of the oligonucleotide are the pattern of backbone linkages, the pattern of backbone chiral centers, and/or the pattern of chemical modifications of Y¹ is that of an oligonucleotide listed in Table 1A and the base sequence of Y′ comprises or is the base sequence of any APOC3 oligonucleotide listed in Table 1A, or the base sequence of Y′ comprises 15 contiguous bases of the sequence of any APOC3 oligonucleotide listed in Table 1A.

[0733] In some embodiments, the oligonucleotide is capable of mediating a decrease in the expression, level and/or activity of an APOC3 target gene or a gene product thereof.

[0734] In some embodiments, the oligonucleotide is capable of mediating a decrease in the expression, level and/or activity of an APOC3 target gene or a gene product thereof via a mechanism mediated by RNaseH, steric hindrance and/or RNA interference.

[0735] In some embodiments: each R⁴⁷ is —N(R⁴⁸)—C(O)—R⁴⁸; and each R⁴⁸ is independently —H, or —(C₁-C₅)alkyl.

[0736] In some embodiments:

[0737] each T¹ is independently absent or is alkylene, wherein

[0738] one or more —CH₂— groups of the alkylene, may each independently be replaced with a heteroatom group independently selected from —O—, and —N(R⁴⁹)— wherein the heteroatom groups are separated by at least 2 carbon atoms;

[0739] each Q¹ is independently absent or is C(O), C(O)—NR⁴⁹, NR⁴⁹—C(O), or a heteroatom group selected from O, and NR⁴⁹, wherein at least two carbon atoms separate the heteroatom groups O and NR⁴⁹ from any other heteroatom group;

[0740] each R⁴⁹ is independently —H, —(C₁-C₆)alkyl, or —(C₃-C₆)cycloalkyl wherein the alkyl and cycloalkyl may be substituted with halo atoms;

[0741] each n is independently 0, 1, 2, 3 or 4; wherein if n is greater than 0, each T¹ and each Q¹ of each (T¹-Q¹-T¹-Q¹) is independently selected.

[0742] In some embodiments, the present disclosure pertains to: a comprising a compound comprising: (a) an oligonucleotide capable of targeting APOC3; (b) a linking group; and (c) 1, 2, or 3 moieties independently selected from Z¹⁰ and Z¹¹; wherein the linking group links the oligonucleotide and the 1, 2 or 3 moieties, and wherein:
[0743] each Z¹⁰ is independently a compound of Formula Z12, Z13, Z14, Z15, Z16, Z17, Z18, Z19, Z20, or Z21, or a geometrical or position isomer thereof, wherein the connection site with L¹ is indicated:

[chemical structure]

[0744] wherein each R⁴⁶ is independently —CN, —CH₂—CN, —C≡CH, —CH₂—N₃, —CH₂—NH₂, —CH₂—N(R⁵²)—S(O)₂—R⁵¹, —CH₂—CO₂H, —CO₂H, —CH₂—OH, —CH₂—SH, —CH═CH—R⁵¹, —CH₂—R⁵¹, —CH₂—S—R⁵¹, —CH₂—N(R⁵²)—R⁵¹, —CH₂—N(R⁵²)—C(O)—R⁵¹, —CH₂—N(R⁵²)—C(O)—O—R⁵¹, —CH₂—N(R⁵²)—C(O)—N(R⁵²)—R⁵¹, —CH₂—O—R⁵¹, —CH₂—O—C(O)—R ⁵¹, —CH₂—O—C(O)—N(R⁵²)—R⁵¹, —CH₂—O—C(O)—O—R⁵¹, —CH₂—S(O)—R⁵¹, —CH₂—S(O)₂—R⁵¹, —CH₂—S(O)₂—N(R⁵²)—R⁵¹, —C(O)—NH₂, —C(O)—O—R⁵¹, —C(O)—N(R⁵²)—R⁵¹, or aryl or heteroaryl, wherein the aryl or heteroaryl is optionally substituted with R5′

[0745] each R⁴⁷ is independently —OH, —N₃, —N(R⁴⁸)₂, —N(R⁴⁸)—C(O)—R⁴⁸, —N(R⁴⁸)—C(O)—N(R⁴⁸)₂, —N(R⁴⁸)—C(O)—OR⁴⁸, —N(R⁴⁸)—S(O)2-R⁴⁸, tetrazole, or triazole, wherein the tetrazole and triazole are optionally substituted with R⁴⁸;

[0746] each R⁴⁸ is independently —H, —(C₁-C₅)alkyl, halo-substituted (C₁-C₅)alkyl, halo substituted —(C₃-C₆)cycloalkyl, —(C₁-C₅)alkenyl, —(C₁-C₅)alkynyl, halo substituted —(C₁-C₅)alkenyl, halo substituted —(C₁-C₅)alkynyl, or —(C₃-C₆)cycloalkyl, wherein a —CH₂— group of the alkyl or cycloalkyl may each be independently replaced with a heteroatom group selected from —O—, —S—, and —N(R⁵²)— and —CH₃ of the alkyl may each be independently replaced with a heteroatom group selected from —N(R⁵²)₂, —OR⁵², and —S(R⁵²) wherein the heteroatom groups are separated by at least 2 carbon atoms;

[0747] each R⁵¹ is independently —H, —(C₃-C₂₀)cycloalkyl, —(C₁-C₆₀)alkenyl, —(C₁-C₆₀)alkynyl, or —(C₁-C₆₀)alkyl wherein one to six —CH₂— groups of the cycloalkyl or one to 20—CH₂— groups of the alkyl may each be independently replaced with heteroatoms independently selected from —O—, —S—, and —N(R⁴⁹)— wherein the heteroatoms are separated by at least two carbon atoms, and —CH₃ of the alkyl may each be independently replaced with a heteroatom group selected from —N(R⁴⁹)₂, —OR⁴⁹, and —S(R⁴⁹) wherein the heteroatom groups are separated by at least 2 carbon atoms, and wherein the alkyl, alkenyl, alkynyl, and cycloalkyl may be substituted with halo atoms; and

[0748] each R⁵² is independently —H, —(C₁-C₂₀)alkyl, —(C₁-C₂₀)alkenyl, —(C₁-C₂₀)alkynyl, or —(C₃-C₆)cycloalkyl wherein one to six —CH₂— groups of the alkyl or cycloalkyl separated by at least two carbon atoms may each be independently replaced with a heteroatom independently selected from —O—, —S—, or —N(R⁴⁹)—, and —CH₃ of the alkyl may each be independently replaced with a heteroatom group selected from —N(R⁴⁹)₂, —OR⁴⁹, and —S(R⁴⁹) wherein the heteroatom groups are separated by at least 2 carbon atoms; and wherein the alkyl, alkenyl, alkynyl, and cycloalkyl may be substituted with halo atoms;

[0749] each R⁴⁹ is independently —H, —(C₁-C₂₀)alkyl, or —(C₃-C₆)cycloalkyl wherein one to six —CH₂— groups of the alkyl or cycloalkyl separated by at least two carbon atoms may be replaced with —O—, —S—, or —N(R^{49a})—, and, —CH₃ of the alkyl may be replaced with a heteroatom group selected from —(N^{49a})₂, —OR^{49a}, and —S(R^{49a}) wherein the heteroatom groups are separated by at least 2 carbon atoms; and wherein the alkyl and cycloalkyl may be substituted with halo atoms and wherein each R^{49a} is independently —H, —(C₁-C₆)alkyl, or —(C₃-C₆)cycloalkyl;

[0750] each R^{49a} is independently —H, —(C₁-C₆)alkyl, or —(C₃-C₆)cycloalkyl;

[0751] and Z¹¹ is a compound of Formula (B), wherein connection site with L² is indicated:

[chemical structure]

[0752] each R⁴⁷ is independently —OH, —N₃, —N(R⁴⁸)₂, —N(R⁴⁸)—C(O)—R⁴⁸, —N(R⁴⁸)—C(O)—N(R⁴⁸)₂, —N(R⁴⁸)—C(O)—OR⁴⁸, —N(R⁴⁸)—S(O)₂—R⁴⁸, tetrazole, or triazole, wherein the tetrazole and triazole are optionally substituted with R⁴⁸;

[0753] each R⁴⁸ is independently —H, halo-substituted —(C₁-C₅)alkyl, halo substituted —(C₃-C₆)cycloalkyl, —(C₁-C₅)alkenyl, —(C₁-C₅)alkynyl, halo substituted —(C₁-C₅)alkenyl, halo substituted —(C₁-C₅)alkynyl, or —(C₃-C₆)cycloalkyl, wherein a —CH₂— group of the alkyl or cycloalkyl may each be independently replaced with a heteroatom group selected from —O—, —S—, and —N(R⁵²)— and —CH₃ of the alkyl may each be independently replaced with a heteroatom group selected from —N(R⁵²)₂, —OR⁵², and —S(R⁵²) wherein the heteroatom groups are separated by at least 2 carbon atoms;

[0754] each R⁴⁹ is independently —H, —(C₁-C₂₀)alkyl, or —(C₃-C₆)cycloalkyl wherein one to six —CH₂— groups of the alkyl or cycloalkyl separated by at least two carbon atoms may be replaced with —O—, —S—, or —N(R^{49a})—, and —CH₃ of the alkyl may be replaced with a heteroatom group selected from —N(R^{49a})2, —OR′, and —S(R^{49a}) wherein the heteroatom groups are separated by at least 2 carbon atoms; and wherein the alkyl and cycloalkyl may be substituted with halo atoms and wherein each R^{49a} is independently —H, —(C₁-C₆)alkyl, or —(C₃-C₆)cycloalkyl;
[0755] 46. each R⁵² is independently —H, —(C₁-C₂₀)alkyl, —(C₁-C₂₀)alkenyl, —(C₁-C₂₀)alkynyl, or —(C₃-C₆)cycloalkyl wherein one to six —CH₂— groups of the alkyl or cycloalkyl separated by at least two carbon atoms may each be independently replaced with a heteroatom independently selected from —O—, —S—, or —N(R⁴⁹)—, and —CH₃ of the alkyl may each be independently replaced with a heteroatom group selected from —N(R⁴⁹)₂, —OR⁴⁹, and —S(R⁴⁹) wherein the heteroatom groups are separated by at least 2 carbon atoms; and wherein the alkyl, alkenyl, alkynyl, and cycloalkyl may be substituted with halo atoms A chirally controlled APOC3 oligonucleotide composition comprising oligonucleotides of a particular oligonucleotide type characterized by:

[0756] a) a common base sequence and length, wherein the base sequence is complementary to an APOC3 target gene;

[0757] b) a common pattern of backbone linkages;

[0758] c) a common pattern of backbone chiral centers, wherein the common pattern of backbone chiral centers comprises at least one internucleotidic linkage comprising a chirally controlled chiral center;

[0759] which composition is chirally controlled in that it is enriched, relative to a substantially racemic preparation of oligonucleotides having the same common base sequence and length, for oligonucleotides of the particular oligonucleotide type; and

[0760] wherein the oligonucleotide composition is capable of decreasing the expression, level and/or activity of an APOC3 target gene or a gene product thereof.

[0761] In some embodiments, the oligonucleotides are capable of capable of decreasing the expression, level and/or activity of an APOC3 target gene or a gene product thereof via a mechanism mediated by RNaseH, steric hindrance and/or RNA interference.

[0762] In some embodiments, the present disclosure pertains to: a composition comprising a compound of any one of the preceding claims.

[0763] In some embodiments, the present disclosure pertains to: a composition comprising an APOC3 oligonucleotide which is a single-stranded RNAi agent, wherein the single-stranded RNAi agent is complementary or substantially complementary to an APOC3 target RNA sequence,

[0764] has a length of about 15 to about 49 nucleotides, and

[0765] is capable of directing target-specific RNA interference,

[0766] wherein the single-stranded RNAi agent comprises at least one non-natural base, sugar, and/or internucleotidic linkage, and

[0767] wherein the composition is capable of decreasing the expression, level and/or activity of an APOC3 target gene or a gene product thereof.

[0768] In some embodiments, the oligonucleotide or oligonucleotides further comprise a bridged bicyclic ketal.

[0769] In some embodiments, R^{CD} is

[chemical structure]

[0770] In some embodiments, R^{CD} is

[chemical structure]

[0771] In some embodiments, R^{CD} is of such a structure that R^{CD}—H is

[chemical structure]

[chemical structure]

[0772] In some embodiments, R^{CD} is connected to the oligonucleotide or oligonucleotides through a linker.

[0773] In some embodiments, the linker is L^{M}.

[0774] In some embodiments, the linker has the structure of

[chemical structure]

[chemical structure]

[0775] In some embodiments, R^{CD} is selected from:

[chemical structure]

[chemical structure]

[chemical structure]

[0776] In some embodiments, the present disclosure pertains to: a pharmaceutical composition comprising a composition of any one of the preceding claims in a therapeutically effective amount, in admixture with at least one pharmaceutically acceptable excipient.

[0777] In some embodiments, the composition further comprises at least one additional pharmaceutical agent selected from the group consisting of an anti-inflammatory agent, an anti-diabetic agent, and a cholesterol/lipid modulating agent.

[0778] In some embodiments, said additional pharmaceutical agent is selected from the group consisting of an acetyl-CoA carboxylase- (ACC) inhibitor, a diacylglycerol O-acyltransferase 1 (DGAT-1) inhibitor, a diacylglycerol O-acyltransferase 2 (DGAT-2) inhibitor, monoacylglycerol O-acyltransferase inhibitors, a phosphodiesterase (PDE)-10 inhibitor, an AMPK activator, a sulfonylurea, a meglitinide, an α-amylase inhibitor, an α-glucoside hydrolase inhibitor, an α-glucosidase inhibitor, a PPARγ agonist, a PPAR α/γ agonist, a biguanide, a glucagon-like peptide 1 (GLP-1) modulator, liraglutide, albiglutide, exenatide, albiglutide, lixisenatide, dulaglutide, semaglutide, a protein tyrosine phosphatase-1B (PTP-1B) inhibitor, SIRT-1 activator, a dipeptidyl peptidase IV (DPP-IV) inhibitor, an insulin secreatagogue, a fatty acid oxidation inhibitor, an A2 antagonist, a c-jun amino-terminal kinase (JNK) inhibitor, glucokinase activators (GKa), insulin, an insulin mimetic, a glycogen phosphorylase inhibitor, a VPAC2 receptor agonist, SGLT2 inhibitors, a glucagon receptor modulator, GPR119 modulators, FGF21 derivatives or analogs, TGR5 receptor modulators, GPBAR1 receptor modulators, GPR40 agonists, GPR120 modulators, high affinity nicotinic acid receptor (HM74A) activators, SGLT1 inhibitors, inhibitors or modulators of carnitine palmitoyl transferase enzymes, inhibitors of fructose 1,6-diphosphatase, inhibitors of aldose reductase, mineralocorticoid receptor inhibitors, inhibitors of TORC2, inhibitors of CCR2 and/or CCR5, inhibitors of PKC isoforms (e.g. PKCα, PKCβ, PKCγ), inhibitors of fatty acid synthetase, inhibitors of serine palmitoyl transferase, modulators of GPR81, GPR39, GPR43, GPR41, GPR105, Kv1.3, retinol binding protein 4, glucocorticoid receptor, somatostatin receptors, inhibitors or modulators of PDHK2 or PDHK4, inhibitors of MAP4K4, modulators of IL1 family including IL1beta, HMG-CoA reductase inhibitors, squalene synthetase inhibitors, fibrates, bile acid sequestrants, ACAT inhibitors, MTP inhibitors, lipooxygenase inhibitors, cholesterol absorption inhibitors, PCSK9 modulators, cholesteryl ester transfer protein inhibitors and modulators of RXRalpha.

[0779] In some embodiments, the composition further comprises at least one additional pharmaceutical agent selected from the group consisting of cysteamine or a pharmaceutically acceptable salt thereof, cystamine or a pharmaceutically acceptable salt thereof, an anti-oxidant compound, lecithin, vitamin B complex, a bile salt preparations, an antagonists of Cannabinoid-1 (CB1) receptor, an inverse agonists of Cannabinoid-1 (CB 1) receptor, a peroxisome proliferator-activated receptor) activity regulators, a benzothiazepine or benzothiepine compound, an RNA antisense construct to inhibit protein tyrosine phosphatase PTPRU, a heteroatom-linked substituted piperidine and derivatives thereof, an azacyclopentane derivative capable of inhibiting stearoyl-coenzyme alpha delta-9 desaturase, acylamide compound having secretagogue or inducer activity of adiponectin, a quaternary ammonium compound, Glatiramer acetate, pentraxin proteins, a HMG-CoA reductase inhibitor, n-acetyl cysteine, isoflavone compound, a macrolide antibiotic, a galectin inhibitor, an antibody, or any combination of thereof.

[0780] In some embodiments, the present disclosure pertains to: a method for the reduction of at least one point in severity of nonalcoholic fatty liver disease or nonalcoholic steatohepatitis grading scoring systems, reduction of the level of serum markers of nonalcoholic steatohepatitis activity, reduction of nonalcoholic steatohepatitis disease activity or reduction in the medical consequences of nonalcoholic steatohepatitis in humans comprising the step of administering to a human in need of such reduction a therapeutically effective amount of a composition of any one of the preceding claims to a patient in need thereof.

[0781] In some embodiments, the present disclosure pertains to: a method for treating fatty liver, nonalcoholic fatty liver disease, nonalcoholic steatohepatitis, nonalcoholic steatohepatitis with liver fibrosis, nonalcoholic steatohepatitis with cirrhosis, or nonalcoholic steatohepatitis with cirrhosis and hepatocellular carcinoma in humans comprising the step of administering to a human in need of such treatment a therapeutically effective amount of a composition of any one of the preceding claims to a patient in need thereof.

[0782] In some embodiments, the present disclosure pertains to: a method for treating hyperlipidemia, Type I diabetes, Type II diabetes mellitus, idiopathic Type I diabetes (Type Ib), latent autoimmune diabetes in adults (LADA), early-onset Type 2 diabetes (EOD), youth-onset atypical diabetes (YOAD), maturity onset diabetes of the young (MODY), malnutrition-related diabetes, gestational diabetes, coronary heart disease, ischemic stroke, restenosis after angioplasty, peripheral vascular disease, intermittent claudication, myocardial infarction, dyslipidemia, post-prandial lipemia, conditions of impaired glucose tolerance (IGT), conditions of impaired fasting plasma glucose, metabolic acidosis, ketosis, arthritis, obesity, osteoporosis, hypertension, congestive heart failure, left ventricular hypertrophy, peripheral arterial disease, diabetic retinopathy, macular degeneration, cataract, diabetic nephropathy, glomerulosclerosis, chronic renal failure, diabetic neuropathy, metabolic syndrome, syndrome X, premenstrual syndrome, angina pectoris, thrombosis, atherosclerosis, transient ischemic attacks, stroke, vascular restenosis, hyperglycemia, hyperinsulinemia, hypertriglyceridemia, insulin resistance, impaired glucose metabolism, erectile dysfunction, skin and connective tissue disorders, foot ulcerations and ulcerative colitis, endothelial dysfunction and impaired vascular compliance, hyper apo B lipoproteinemia, Alzheimer's, schizophrenia, impaired cognition, inflammatory bowel disease, ulcerative colitis, Crohn's disease, and irritable bowel syndrome, non-alcoholic steatohepatitis (NASH), or non-alcoholic fatty liver disease (NAFLD), in humans comprising the step of administering to a human in need of such treatment a therapeutically effective amount of a composition of any one of the preceding claims to a patient in need thereof.

[0783] In some embodiments, the present disclosure pertains to: a method for treating fatty liver, nonalcoholic fatty liver disease, nonalcoholic steatohepatitis, nonalcoholic steatohepatitis with liver fibrosis, nonalcoholic steatohepatitis with cirrhosis, or nonalcoholic steatohepatitis with cirrhosis and hepatocellular carcinoma in humans comprising the step of administering to a human in need of such treatment a therapeutically effective amount of two separate pharmaceutical compositions comprising

[0784] a. a first composition of any one of the preceding claims; and

[0785] b. a second composition comprising at least one additional pharmaceutical agent selected from the group consisting of an anti-inflammatory agent, an anti-diabetic agent, and a cholesterol/lipid modulating agent and at least one pharmaceutically acceptable excipient.

[0786] In some embodiments, said first composition and said second composition are administered simultaneously.

[0787] In some embodiments, said first composition and said second composition are administered sequentially and in any order.

[0788] In some embodiments, the present disclosure pertains to: a method for reducing portal hypertension, hepatic protein synthetic capability, hyperbilirubinemia, or encephalopathy in humans comprising the step of administering to a human in need of such treatment a therapeutically effective amount of a composition of any one of the preceding claims to a patient in need thereof.

[0789] In some embodiments, the present disclosure pertains to: a method of decreasing the expression, activity and/or level of an APOC3 target gene or a gene product thereof in a cell, comprising the step of contacting the cell with a compound or composition of any one of the preceding claims.

[0790] In some embodiments, the present disclosure pertains to: a method of decreasing the expression, activity and/or level of an APOC3 target gene or a gene product thereof in a patient, comprising the step of contacting the cell with a compound or composition of any one of the preceding claims.

[0791] In some embodiments, a GalNAc, as the term is used herein, refers to a chemical entity which is structurally similar to a GalNAc and/or which performs at least one function of a GalNAc (e.g., binding to ASPGR).

[0792] In some embodiments, a 5′-end of a single-stranded RNAi agent comprises a GalNAc or a variant or derivative thereof.

[0793] A non-limiting example of a GalNAc moiety at the 5′-end of an APOC3 oligonucleotide or single-stranded RNAi agent (e.g., 5′ GalNAc moiety) is shown below, wherein the 5′ end structure is represented by:

[chemical structure]

[0794] In some embodiments, a GalNAc moiety, e.g., a GalNAc or a variant or derivative thereof, is described in any of: Migawa et al. 2016 Bioorg. Med. Chem. Lett. 26: 2914-7; Ostergaard et al. 2015 Bioconjug. Chem. 26: 1451-1455; Prakash et al. 2014 Nucl. Acids Res. 42: 8796-8807; Prakash et al. 2016 J. Med. Chem. 59: 2718-33; Shemesh et al. 2016 Mol. Ther. Nucl. Acids 5: e319; St-Pierre et al. 2016 Bioorg. Med. Chem. 24: 2397-409; and/or Yu et al. 2016 Mol. Ther. Nucl. Acids 5: e317.

[0795] In some embodiments, a chemical moiety (e.g., additional component) conjugated to an APOC3 oligonucleotide binds to ASPGR.

[0796] In some embodiments, a chemical moiety (e.g., additional component) conjugated to an APOC3 oligonucleotide binds to ASPGR and comprises any of: Mod031, Mod034, Mod035, Mod036, Mod038, Mod039, Mod040, or Mod041.

[0797] In some embodiments, an additional component can be or comprise any of: Mod079, Mod080, Mod081, Mod082 or Mod083. In some embodiments, an additional component can be or comprise any of:

[chemical structure]

[chemical structure]

[chemical structure]

[chemical structure]

[chemical structure]

[chemical structure]

[chemical structure]

[chemical structure]

[0798] In some embodiments, an additional component can be or comprise:

[chemical structure]

wherein Mod061 is conjugated to three identical or non-identical oligonucleotides.

[0799] 5′ Nucleoside or 5′ Nucleotide of an APOC3 Oligonucleotide

[0800] In some embodiments, provided oligonucleotides are capable of directing a decrease in the expression and/or level of a target gene or its gene product. In some embodiments, provided oligonucleotides are capable of directing a decrease in the expression and/or level of a target gene or its gene product via RNA interference. In some embodiments, provided oligonucleotides are capable of directing a decrease in the expression and/or level of a target gene or its gene product via a biochemical mechanism which does not involve RNA interference or RISC (including, but not limited to, RNaseH-mediated knockdown or steric hindrance of gene expression). In some embodiments, provided oligonucleotides are capable of directing a decrease in the expression and/or level of a target gene or its gene product via RNA interference and/or RNase H-mediated knockdown. In some embodiments, provided oligonucleotides are capable of directing a decrease in the expression and/or level of a target gene or its gene product by sterically blocking translation after annealing to a target gene mRNA, and/or by altering or interfering with mRNA splicing and/or exon inclusion or exclusion. In some embodiments, provided oligonucleotides can comprise any 5′-nucleoside or 5′-nucleotide described herein or known in the art.

[0801] In some embodiments, the 5′ nucleoside, e.g., the nucleoside at the 5′-end, of a single-stranded RNAi agent (e.g., in N1) can be any nucleoside, modified nucleoside or universal nucleoside known in the art.

[0802] In some embodiments, the 5′ nucleotide, e.g., the nucleoside at the 5′-end, of a single-stranded RNAi agent (e.g., in N1) can comprise a 2′ modification at the base.

[0803] In some embodiments, the nucleoside at the 5′-end of a single-stranded RNAi agent (e.g., in N1) can comprise a 2′-deoxy (DNA), 2′-F, 2′-OMe, or 2′-MOE, or an inverted nucleoside or nucleotide.

[0804] Non-limiting examples of ssRNAi agent formats in which the nucleoside at the 5′-end of the ssRNAi agent is a 2′-deoxy (DNA) include: Formats 1-5, 16-18, 22-29, 32-78, 84-93, 97, and 103-107 of FIG. 1.

[0805] Non-limiting examples of ssRNAi agent formats in which the nucleoside at the 5′-end of the ssRNAi agent is a 2′-F include: Formats 11-15, 19, 79-83, and 98-100 of FIG. 1.

[0806] Non-limiting examples of ssRNAi agent formats in which the nucleoside at the 5′-end of the ssRNAi agent is a 2′-OMe include: Formats 6-10, 20-21, 30-31, 94-96, and 101-102 of FIG. 1.

[0807] In some embodiments, the nucleobase at the 5′-end of a single-stranded RNAi agent (e.g., in N1) is T. In some embodiments, the nucleobase at the 5′-end of a single-stranded RNAi agent (e.g., in N1) is U. In some embodiments, the nucleobase at the 5′-end of a single-stranded RNAi agent (e.g., in N1) is A. In some embodiments, the nucleobase at the 5′-end of a single-stranded RNAi agent (e.g., in N1) is G. In some embodiments, the nucleobase at the 5′-end of a single-stranded RNAi agent (e.g., in N1) is C.

[0808] In some embodiments, a provided single-stranded RNAi agent has a 5′ mismatch, wherein the nucleobase at the 5′-end of the single-stranded RNAi agent (position N1) has a mismatch from the corresponding position of the target transcript. As has been reported in the art, complementarity between the 5′ nucleotide moiety and the corresponding position of the target transcript is not required for efficacious double-stranded siRNAs. Various example single-stranded RNAi agents described herein also have a 5′ mismatch and are still capable of directing RNA interference. Efficacious ssRNAi agents have been constructed which have a mismatch with the sequence of the target mRNA at the 5′ position (N1). Efficacious ssRNAi agents have been constructed which have a mismatch with the sequence of the target mRNA at the 5′ position and the N1 position of the ssRNAi is T. In some embodiments, a provided single-stranded RNAi agent has a 5′ mismatch at N1, wherein the nucleobase in N1 is T.

[0809] In some embodiments, the nucleoside at the 5′ position is a LNA.

[0810] In some embodiments, the nucleoside at the 5′ position is a 5′-H (deoxy). Efficacious ssRNAi agents have been constructed wherein the nucleoside at the 5′ position is a 5′-H (deoxy). In some embodiments, the nucleoside at the 5′ position is deoxy T, A, G, or C. In some embodiments, the nucleoside at the 5′ position is deoxy T. In some embodiments, the nucleoside at the 5′ position is deoxy A. In some embodiments, the nucleoside at the 5′ position is a 2′-F. Efficacious ssRNAi agents have been constructed wherein the nucleoside at the 5′ position is a 2′-F. In some embodiments, the nucleoside at the 5′ position is a 2′-F A. In some embodiments, the nucleoside at the 5′ position is a 2′-F G. In some embodiments, the nucleoside at the 5′ position is a 2′-OMe. Efficacious ssRNAi agents have been constructed wherein the nucleoside at the 5′ position is a 2′-OMe. In some embodiments, the nucleoside at the 5′ position is a 2′-OMe U. In some embodiments, the nucleoside at the 5′ position is a 2′-OMe A. In some embodiments, the nucleoside at the 5′ position is a 2′-OMe C.

[0811] Seed Region of an APOC3 Oligonucleotide, Including a Single-Stranded RNAi Agent

[0812] In some embodiments, an APOC3 oligonucleotide, an APOC3 oligonucleotide that directs RNA interference, an APOC3 oligonucleotide that directs RNase H-mediated knockdown, or an APOC3 oligonucleotide that directs both RNA interference and RNase H-mediated knockdown can comprise any seed region or portion or structural element thereof described herein or known in the art.

[0813] In some embodiments, a seed region of a provided single-stranded RNAi agent is a portion of the RNAi agent which is particularly important in binding of the RNAi agent to a transcript target. Lim et al. 2005 Nature 433: 769-773. In many cases, full complementarity between the seed region of the RNAi agent antisense strand and the mRNA target is reportedly required for high RNAi activity. For example, a single mismatch at position 6 in the seed region reportedly abolished double-stranded RNAi activity; Lim et al. 2005 Nature 433: 769-773. In contrast, dsRNAi antisense strands reportedly are more amenable to mismatches outside the seed region, e.g., at the 5′ position, in the post-seed region, and in the 3′-terminal dinucleotide.

[0814] In some embodiments, each nucleotide in the seed region is 2′-OMe.

[0815] In some embodiments, each nucleotide in the seed region is 2′-OMe, and each nucleotide in the post-seed region is 2′-OMe.

[0816] In some embodiments, one nucleotide in the seed region is 2′-F and each other nucleotide in the seed region is 2′-OMe.

[0817] In some embodiments, one nucleotide in the seed region is 2′-F and each other nucleotide in the seed region is 2′-OMe, and one nucleotide in the post-seed region is 2′-F and each other nucleotide in the post-seed region is 2′-OMe.

[0818] In some embodiments, the nucleotide at position 2 (counting from the 5′-end) is 2′-F and each other nucleotide in the seed region is 2′-OMe, and one nucleotide in the post-seed region is 2′-F and each other nucleotide in the post-seed region is 2′-OMe.

[0819] In some embodiments, the nucleotide at position 2 (counting from the 5′-end) is 2′-F and each other nucleotide in the seed region is 2′-OMe, and the nucleotide at position 14 (counting from the 5′-end) is 2′-F and each other nucleotide in the post-seed region is 2′-OMe.

[0820] In some embodiments, a provided single-stranded RNAi agent comprises a seed region in which any number of N can be 2′-deoxy, 2′-F, 2′-OMe and/or 2′-OH, and/or have any other modification at the 2′ position of the sugar.

[0821] Various non-limiting examples of seed regions of single-stranded RNAi agents are presented in Table 1A, the Figures, and elsewhere herein. In some embodiments, a provided single-stranded RNAi agent comprises a seed region, in which any one or more nucleotides in the seed region are independently 2′-F. In some embodiments, a provided single-stranded RNAi agent comprises a seed region, in which any 2 or more nucleotides in the seed region are independently 2′-F. In some embodiments, a provided single-stranded RNAi agent comprises a seed region, in which any 3 or more nucleotides in the seed region are independently 2′-F. In some embodiments, a provided single-stranded RNAi agent comprises a seed region, in which any 4 or more nucleotides in the seed region are independently 2′-F. In some embodiments, a provided single-stranded RNAi agent comprises a seed region, in which any 5 or more nucleotides in the seed region are independently 2′-F. In some embodiments, a provided single-stranded RNAi agent comprises a seed region, in which any 6 or more nucleotides in the seed region are independently 2′-F.

[0822] In some embodiments, a provided single-stranded RNAi agent comprises a seed region, in which any one or more nucleotides in the seed region are independently 2′-OMe. In some embodiments, a provided single-stranded RNAi agent comprises a seed region, in which any 2 or more nucleotides in the seed region are independently 2′-OMe. In some embodiments, a provided single-stranded RNAi agent comprises a seed region, in which any 3 or more nucleotides in the seed region are independently 2′-OMe. In some embodiments, a provided single-stranded RNAi agent comprises a seed region, in which any 4 or more nucleotides in the seed region are independently 2′-OMe. In some embodiments, a provided single-stranded RNAi agent comprises a seed region, in which any 5 or more nucleotides in the seed region are independently 2′-OMe. In some embodiments, a provided single-stranded RNAi agent comprises a seed region, in which any 6 or more nucleotides in the seed region are independently 2′-OMe. In some embodiments, a provided single-stranded RNAi agent comprises a seed region, in which 7 of N2 to N7 are independently 2′-OMe.

[0823] In some embodiments, a provided single-stranded RNAi agent comprises a seed region, in which any one or more nucleotides in the seed region are independently 2′-M0E. In some embodiments, a provided single-stranded RNAi agent comprises a seed region, in which any 2 or more nucleotides in the seed region are independently 2′-M0E. In some embodiments, a provided single-stranded RNAi agent comprises a seed region, in which any 3 or more nucleotides in the seed region are independently 2′-M0E. In some embodiments, a provided single-stranded RNAi agent comprises a seed region, in which any 4 or more nucleotides in the seed region are independently 2′-M0E. In some embodiments, a provided single-stranded RNAi agent comprises a seed region, in which any 5 or more nucleotides in the seed region are independently 2′-M0E. In some embodiments, a provided single-stranded RNAi agent comprises a seed region, in which any 6 or more nucleotides in the seed region are independently 2′-M0E. In some embodiments, a provided single-stranded RNAi agent comprises a seed region, in which 7 of N2 to N7 are independently 2′-M0E.

[0824] In some embodiments, a provided single-stranded RNAi agent comprises a seed region, in which any one or more nucleotides in the seed region are independently 2′-deoxy. In some embodiments, a provided single-stranded RNAi agent comprises a seed region, in which any 2 or more nucleotides in the seed region are independently 2′-deoxy. In some embodiments, a provided single-stranded RNAi agent comprises a seed region, in which any 3 or more nucleotides in the seed region are independently 2′-deoxy. In some embodiments, a provided single-stranded RNAi agent comprises a seed region, in which any 4 or more nucleotides in the seed region are independently 2′-deoxy. In some embodiments, a provided single-stranded RNAi agent comprises a seed region, in which any 5 or more nucleotides in the seed region are independently 2′-deoxy. In some embodiments, a provided single-stranded RNAi agent comprises a seed region, in which any 6 or more nucleotides in the seed region are independently 2′-deoxy. In some embodiments, a provided single-stranded RNAi agent comprises a seed region, in which 7 of N2 to N7 are independently 2′-deoxy.

[0825] In some embodiments, a provided single-stranded RNAi agent comprises a seed region, in which any one or more non-consecutive nucleotides in the seed region are independently 2′-F. In some embodiments, a provided single-stranded RNAi agent comprises a seed region, in which any 2 or more non-consecutive nucleotides in the seed region are independently 2′-F. In some embodiments, a provided single-stranded RNAi agent comprises a seed region, in which any 3 or more non-consecutive nucleotides in the seed region are independently 2′-F. In some embodiments, a provided single-stranded RNAi agent comprises a seed region, in which any 4 or more non-consecutive nucleotides in the seed region are independently 2′-F.

[0826] In some embodiments, a provided single-stranded RNAi agent comprises a seed region, in which any one or more non-consecutive nucleotides in the seed region are independently 2′-OMe. In some embodiments, a provided single-stranded RNAi agent comprises a seed region, in which any 2 or more non-consecutive nucleotides in the seed region are independently 2′-OMe. In some embodiments, a provided single-stranded RNAi agent comprises a seed region, in which any 3 or more non-consecutive nucleotides in the seed region are independently 2′-OMe. In some embodiments, a provided single-stranded RNAi agent comprises a seed region, in which any 4 or more non-consecutive nucleotides in the seed region are independently 2′-OMe.

[0827] In some embodiments, a provided single-stranded RNAi agent comprises a seed region, in which any one or more non-consecutive nucleotides in the seed region are independently 2′-M0E. In some embodiments, a provided single-stranded RNAi agent comprises a seed region, in which any 2 or more non-consecutive nucleotides in the seed region are independently 2′-M0E. In some embodiments, a provided single-stranded RNAi agent comprises a seed region, in which any 3 or more non-consecutive nucleotides in the seed region are independently 2′-M0E. In some embodiments, a provided single-stranded RNAi agent comprises a seed region, in which any 4 or more non-consecutive nucleotides in the seed region are independently 2′-M0E.

[0828] In some embodiments, a provided single-stranded RNAi agent comprises a seed region, in which any one or more non-consecutive nucleotides in the seed region are independently 2′-deoxy. In some embodiments, a provided single-stranded RNAi agent comprises a seed region, in which any 2 or more non-consecutive nucleotides in the seed region are independently 2′-deoxy. In some embodiments, a provided single-stranded RNAi agent comprises a seed region, in which any 3 or more non-consecutive nucleotides in the seed region are independently 2′-deoxy. In some embodiments, a provided single-stranded RNAi agent comprises a seed region, in which any 4 or more non-consecutive nucleotides in the seed region are independently 2′-deoxy.

[0829] In some embodiments, a provided single-stranded RNAi agent comprises a seed region, in which any 3 of the nucleotides in the seed region are independently 2′-deoxy.

[0830] In some embodiments, a provided single-stranded RNAi agent comprises a seed region, in which any one or more internucleotidic linkages in the seed region are independently PO (phosphodiester). In some embodiments, a provided single-stranded RNAi agent comprises a seed region, in which any 2 or more internucleotidic linkages in the seed region are independently PO. In some embodiments, a provided single-stranded RNAi agent comprises a seed region, in which any 3 or more internucleotidic linkages in the seed region are independently PO. In some embodiments, a provided single-stranded RNAi agent comprises a seed region, in which any 4 or more internucleotidic linkages in the seed region are independently PO. In some embodiments, a provided single-stranded RNAi agent comprises a seed region, in which any 5 or more internucleotidic linkages in the seed region are independently PO. In some embodiments, a provided single-stranded RNAi agent comprises a seed region, in which any 6 or more internucleotidic linkages in the seed region are independently PO. In some embodiments, a provided single-stranded RNAi agent comprises a seed region, in which 7 of N2 to N7 are independently PO.

[0831] In some embodiments, a provided single-stranded RNAi agent comprises a seed region, in which any one or more internucleotidic linkages in the seed region are independently PS (phosphorothioate). In some embodiments, a provided single-stranded RNAi agent comprises a seed region, in which any 2 or more internucleotidic linkages in the seed region are independently PS. In some embodiments, a provided single-stranded RNAi agent comprises a seed region, in which any 3 or more internucleotidic linkages in the seed region are independently PS. In some embodiments, a provided single-stranded RNAi agent comprises a seed region, in which any 4 or more internucleotidic linkages in the seed region are independently PS. In some embodiments, a provided single-stranded RNAi agent comprises a seed region, in which any 5 or more internucleotidic linkages in the seed region are independently PS. In some embodiments, a provided single-stranded RNAi agent comprises a seed region, in which any 6 or more internucleotidic linkages in the seed region are independently PS. In some embodiments, a provided single-stranded RNAi agent comprises a seed region, in which 7 of N2 to N7 are independently PS.

[0832] In some embodiments, a provided single-stranded RNAi agent comprises a seed region, in which any one or more internucleotidic linkages in the seed region are independently Sp (phosphorothioate in the Sp configuration). In some embodiments, a provided single-stranded RNAi agent comprises a seed region, in which any 2 or more internucleotidic linkages in the seed region are independently Sp. In some embodiments, a provided single-stranded RNAi agent comprises a seed region, in which any 3 or more internucleotidic linkages in the seed region are independently Sp. In some embodiments, a provided single-stranded RNAi agent comprises a seed region, in which any 4 or more internucleotidic linkages in the seed region are independently Sp. In some embodiments, a provided single-stranded RNAi agent comprises a seed region, in which any 5 or more internucleotidic linkages in the seed region are independently Sp. In some embodiments, a provided single-stranded RNAi agent comprises a seed region, in which any 6 or more internucleotidic linkages in the seed region are independently Sp. In some embodiments, a provided single-stranded RNAi agent comprises a seed region, in which 7 of N2 to N7 are independently Sp.

[0833] In some embodiments, a provided single-stranded RNAi agent comprises a seed region, in which any one or more internucleotidic linkages in the seed region are independently Rp (phosphorothioate in the Rp configuration). In some embodiments, a provided single-stranded RNAi agent comprises a seed region, in which any 2 or more internucleotidic linkages in the seed region are independently Rp. In some embodiments, a provided single-stranded RNAi agent comprises a seed region, in which any 3 or more internucleotidic linkages in the seed region are independently Rp. In some embodiments, a provided single-stranded RNAi agent comprises a seed region, in which any 4 or more internucleotidic linkages in the seed region are independently Rp. In some embodiments, a provided single-stranded RNAi agent comprises a seed region, in which any 5 or more internucleotidic linkages in the seed region are independently Rp. In some embodiments, a provided single-stranded RNAi agent comprises a seed region, in which any 6 or more internucleotidic linkages in the seed region are independently Rp. In some embodiments, a provided single-stranded RNAi agent comprises a seed region, in which 7 of N2 to N7 are independently Rp.

[0834] In some embodiments, a provided single-stranded RNAi agent comprises a seed region, in which any one or more non-consecutive internucleotidic linkages in the seed region are independently PO. In some embodiments, a provided single-stranded RNAi agent comprises a seed region, in which any 2 or more non-consecutive internucleotidic linkages in the seed region are independently PO. In some embodiments, a provided single-stranded RNAi agent comprises a seed region, in which any 3 or more non-consecutive internucleotidic linkages in the seed region are independently PO. In some embodiments, a provided single-stranded RNAi agent comprises a seed region, in which any 4 or more non-consecutive internucleotidic linkages in the seed region are independently PO.

[0835] In some embodiments, a provided single-stranded RNAi agent comprises a seed region, in which any one or more non-consecutive internucleotidic linkages in the seed region are independently Sp. In some embodiments, a provided single-stranded RNAi agent comprises a seed region, in which any 2 or more non-consecutive internucleotidic linkages in the seed region are independently Sp. In some embodiments, a provided single-stranded RNAi agent comprises a seed region, in which any 3 or more non-consecutive internucleotidic linkages in the seed region are independently Sp. In some embodiments, a provided single-stranded RNAi agent comprises a seed region, in which any 4 or more non-consecutive internucleotidic linkages in the seed region are independently Sp.

[0836] In some embodiments, a provided single-stranded RNAi agent comprises a seed region, in which any one or more non-consecutive internucleotidic linkages in the seed region are independently Rp. In some embodiments, a provided single-stranded RNAi agent comprises a seed region, in which any 2 or more non-consecutive internucleotidic linkages in the seed region are independently Rp. In some embodiments, a provided single-stranded RNAi agent comprises a seed region, in which any 3 or more non-consecutive internucleotidic linkages in the seed region are independently Rp. In some embodiments, a provided single-stranded RNAi agent comprises a seed region, in which any 4 or more non-consecutive internucleotidic linkages in the seed region are independently Rp.

[0837] In some embodiments, a provided single-stranded RNAi agent comprises a seed region, in which any one or more non-consecutive internucleotidic linkages in the seed region are independently PS. In some embodiments, a provided single-stranded RNAi agent comprises a seed region, in which any 2 or more non-consecutive internucleotidic linkages in the seed region are independently PS. In some embodiments, a provided single-stranded RNAi agent comprises a seed region, in which any 3 or more non-consecutive internucleotidic linkages in the seed region are independently PS. In some embodiments, a provided single-stranded RNAi agent comprises a seed region, in which any 4 or more non-consecutive internucleotidic linkages in the seed region are independently PS.

[0838] In some embodiments, a provided single-stranded RNAi agent comprises a seed region, in which the pattern of 2′ modifications of the nucleotides comprises the pattern of 2′ modifications of the nucleotides in the seed region of any single-stranded RNAi format shown in FIG. 1.

[0839] In some embodiments, a provided single-stranded RNAi agent comprises a seed region, in which the pattern of 2′ modifications of the nucleotides comprises: fmfmfm, where f is 2′-F and m is 2′-OMe.

[0840] In some embodiments, a provided single-stranded RNAi agent comprises a seed region, in which the pattern of 2′ modifications of the nucleotides comprises: fmfmfmf, where f is 2′-F and m is 2′-OMe.

[0841] In some embodiments, a provided single-stranded RNAi agent comprises a seed region, in which the pattern of 2′ modifications of the nucleotides comprises: mfmfmf, where f is 2′-F and m is 2′-OMe.

[0842] In some embodiments, a provided single-stranded RNAi agent comprises a seed region, in which the pattern of 2′ modifications of the nucleotides comprises: fmfmf, where f is 2′-F and m is 2′-OMe.

[0843] In some embodiments, a provided single-stranded RNAi agent comprises a seed region, in which the pattern of 2′ modifications of the nucleotides comprises: mfmfmf, where f is 2′-F and m is 2′-OMe.

[0844] In some embodiments, a provided single-stranded RNAi agent comprises a seed region, in which the pattern of 2′ modifications of the nucleotides comprises: mfmfm, where f is 2′-F and m is 2′-OMe.

[0845] In some embodiments, a provided single-stranded RNAi agent comprises a seed region, in which the pattern of 2′ modifications of the nucleotides comprises: mfmfmfm, where f is 2′-F and m is 2′-OMe.

[0846] In some embodiments, a provided single-stranded RNAi agent comprises a seed region, in which the pattern of 2′ modifications of the nucleotides comprises: fmfmf, where f is 2′-F and m is 2′-OMe.

[0847] In some embodiments, a provided single-stranded RNAi agent comprises a seed region, in which the pattern of 2′ modifications of the nucleotides comprises: mfmfmfm, where f is 2′-F and m is 2′-OMe.

[0848] In some embodiments, a provided single-stranded RNAi agent comprises a seed region, in which the pattern of 2′ modifications of the nucleotides comprises: mfMfmf, where f is 2′-F, m is 2′-OMe, and M is 2′-MOE.

[0849] In some embodiments, a provided single-stranded RNAi agent comprises a seed region, in which the pattern of 2′ modifications of the nucleotides comprises: mfMfmfm, where f is 2′-F, m is 2′-OMe, and M is 2′-MOE.

[0850] In some embodiments, a provided single-stranded RNAi agent comprises a seed region, in which the pattern of 2′ modifications of the nucleotides comprises: mfMfm, where f is 2′-F, m is 2′-OMe, and M is 2′-MOE.

[0851] In some embodiments, a provided single-stranded RNAi agent comprises a seed region, in which the pattern of 2′ modifications of the nucleotides comprises: mfMf, where f is 2′-F, m is 2′-OMe, and M is 2′-MOE.

[0852] In some embodiments, a provided single-stranded RNAi agent comprises a seed region, in which the pattern of 2′ modifications of the nucleotides comprises: mfmfMf, where f is 2′-F, m is 2′-OMe, and M is 2′-MOE.

[0853] In some embodiments, a provided single-stranded RNAi agent comprises a seed region, in which the pattern of 2′ modifications of the nucleotides comprises: mfmfMfm, where f is 2′-F, m is 2′-OMe, and M is 2′-MOE.

[0854] In some embodiments, a provided single-stranded RNAi agent comprises a seed region, in which the pattern of 2′ modifications of the nucleotides comprises: mfmfM, where f is 2′-F, m is 2′-OMe, and M is 2′-MOE.

[0855] In some embodiments, a provided single-stranded RNAi agent comprises a seed region, in which the pattern of 2′ modifications of the nucleotides comprises: mfMfMf, where f is 2′-F, m is 2′-OMe, and M is 2′-MOE.

[0856] In some embodiments, a provided single-stranded RNAi agent comprises a seed region, in which the pattern of 2′ modifications of the nucleotides comprises: mfMfMfM, where f is 2′-F, m is 2′-OMe, and M is 2′-MOE.

[0857] In some embodiments, a provided single-stranded RNAi agent comprises a seed region, in which the pattern of 2′ modifications of the nucleotides comprises: mfMfM, where f is 2′-F, m is 2′-OMe, and M is 2′-MOE.

[0858] In some embodiments, a provided single-stranded RNAi agent comprises a seed region, in which the pattern of 2′ modifications of the nucleotides comprises: fdfdfd, where d is 2′-deoxy and m is 2′-OMe.

[0859] In some embodiments, a provided single-stranded RNAi agent comprises a seed region, in which the pattern of 2′ modifications of the nucleotides comprises: fdfdfdf, where d is 2′-deoxy and m is 2′-OMe.

[0860] In some embodiments, a provided single-stranded RNAi agent comprises a seed region, in which the pattern of 2′ modifications of the nucleotides comprises: dfdfdf, where d is 2′-deoxy and m is 2′-OMe.

[0861] In some embodiments, a provided single-stranded RNAi agent comprises a seed region, in which the pattern of 2′ modifications of the nucleotides comprises: fdfdf, where d is 2′-deoxy and m is 2′-OMe.

[0862] In some embodiments, a provided single-stranded RNAi agent comprises a seed region, in which the pattern of 2′ modifications of the nucleotides comprises: ffmmmm, where f is 2′-F and m is 2′-OMe.

[0863] In some embodiments, a provided single-stranded RNAi agent comprises a seed region, in which the pattern of 2′ modifications of the nucleotides comprises: fmmmm, where f is 2′-F and m is 2′-OMe.

[0864] In some embodiments, a provided single-stranded RNAi agent comprises a seed region, in which the pattern of 2′ modifications of the nucleotides comprises: ffmmm, where f is 2′-F and m is 2′-OMe.

[0865] In some embodiments, a provided single-stranded RNAi agent comprises a seed region, in which the pattern of 2′ modifications of the nucleotides comprises: ffmm, where f is 2′-F and m is 2′-OMe.

[0866] In some embodiments, a provided single-stranded RNAi agent comprises a seed region, in which the pattern of 2′ modifications of the nucleotides comprises: ffmmmmmm, where f is 2′-F and m is 2′-OMe.

[0867] In some embodiments, a provided single-stranded RNAi agent comprises a seed region, in which the pattern of 2′ modifications of the nucleotides comprises: ffmmmmm, where f is 2′-F and m is 2′-OMe.

[0868] In some embodiments, a provided single-stranded RNAi agent comprises a seed region, in which the pattern of 2′ modifications of the nucleotides comprises: mmmm, where m is 2′-OMe.

[0869] In some embodiments, a provided single-stranded RNAi agent comprises a seed region, in which the pattern of 2′ modifications of the nucleotides comprises: mmmmm, where m is 2′-OMe.

[0870] In some embodiments, a provided single-stranded RNAi agent comprises a seed region, in which the pattern of 2′ modifications of the nucleotides comprises: mmmmmm, where m is 2′-OMe.

[0871] In some embodiments, a provided single-stranded RNAi agent comprises a seed region, in which the pattern of 2′ modifications of the nucleotides comprises: mfmfm, where f is 2′-F and m is 2′-OMe.

[0872] In some embodiments, a provided single-stranded RNAi agent comprises a seed region, in which the pattern of internucleotidic linkages comprises the pattern of internucleotidic linkages in the seed region of any single-stranded RNAi format shown in FIG. 1.

[0873] In some embodiments, a provided single-stranded RNAi agent comprises a seed region, in which the pattern of internucleotidic linkages comprises: XOXOXO, where X is phosphorothioate and O is phosphodiester.

[0874] In some embodiments, a provided single-stranded RNAi agent comprises a seed region, in which the pattern of internucleotidic linkages comprises: XOXOXOX, where X is phosphorothioate and O is phosphodiester.

[0875] In some embodiments, a provided single-stranded RNAi agent comprises a seed region, in which the pattern of internucleotidic linkages comprises: OXOXOX, where X is phosphorothioate and O is phosphodiester.

[0876] In some embodiments, a provided single-stranded RNAi agent comprises a seed region, in which the pattern of internucleotidic linkages comprises: XOXOX, where X is phosphorothioate and O is phosphodiester.

[0877] In some embodiments, a provided single-stranded RNAi agent comprises a seed region, in which the pattern of internucleotidic linkages comprises: OXOXOX, where X is phosphorothioate and O is phosphodiester.

[0878] In some embodiments, a provided single-stranded RNAi agent comprises a seed region, in which the pattern of internucleotidic linkages comprises: OXOXOXO, where X is phosphorothioate and O is phosphodiester.

[0879] In some embodiments, a provided single-stranded RNAi agent comprises a seed region, in which the pattern of internucleotidic linkages comprises: OXOXO, where X is phosphorothioate and O is phosphodiester.

[0880] In some embodiments, a provided single-stranded RNAi agent comprises a seed region, in which the pattern of internucleotidic linkages comprises: OXOX, where X is phosphorothioate and O is phosphodiester.

[0881] In some embodiments, a provided single-stranded RNAi agent comprises a seed region, in which the pattern of internucleotidic linkages comprises: XXOXOX, where X is phosphorothioate and O is phosphodiester.

[0882] In some embodiments, a provided single-stranded RNAi agent comprises a seed region, in which the pattern of internucleotidic linkages comprises: XXOXOXO, where X is phosphorothioate and O is phosphodiester.

[0883] In some embodiments, a provided single-stranded RNAi agent comprises a seed region, in which the pattern of internucleotidic linkages comprises: XXOXO, where X is phosphorothioate and O is phosphodiester.

[0884] In some embodiments, a provided single-stranded RNAi agent comprises a seed region, in which the pattern of internucleotidic linkages comprises: XXOX, where X is phosphorothioate and O is phosphodiester.

[0885] In some embodiments, a provided single-stranded RNAi agent comprises a seed region, in which the pattern of internucleotidic linkages comprises: OOOOOO, where O is phosphodiester.

[0886] In some embodiments, a provided single-stranded RNAi agent comprises a seed region, in which the pattern of internucleotidic linkages comprises: OOOOO, where O is phosphodiester.

[0887] In some embodiments, a provided single-stranded RNAi agent comprises a seed region, in which the pattern of internucleotidic linkages comprises: OOOO, where O is phosphodiester.

[0888] In some embodiments, a provided single-stranded RNAi agent comprises a seed region, in which the pattern of internucleotidic linkages comprises: SOSOSO, where S is a phosphorothioate in the Sp configuration and O is phosphodiester.

[0889] In some embodiments, a provided single-stranded RNAi agent comprises a seed region, in which the pattern of internucleotidic linkages comprises: SOSOSOS, where S is a phosphorothioate in the Sp configuration and O is phosphodiester.

[0890] In some embodiments, a provided single-stranded RNAi agent comprises a seed region, in which the pattern of internucleotidic linkages comprises: OSOSOS, where S is a phosphorothioate in the Sp configuration and O is phosphodiester.

[0891] In some embodiments, a provided single-stranded RNAi agent comprises a seed region, wherein the seed region comprises a phosphorothioate in the Sp configuration.

[0892] In some embodiments, a provided single-stranded RNAi agent comprises a seed region, wherein the seed region comprises a phosphorothioate in the Sp configuration and a phosphodiester.

[0893] In some embodiments, a provided single-stranded RNAi agent comprises a seed region, in which the pattern of internucleotidic linkages comprises: SOSOS, where S is a phosphorothioate in the Sp configuration and O is phosphodiester.

[0894] In some embodiments, a provided single-stranded RNAi agent comprises a seed region, in which the pattern of internucleotidic linkages comprises: SOSSSS, where S is a phosphorothioate in the Sp configuration and O is phosphodiester.

[0895] In some embodiments, a provided single-stranded RNAi agent comprises a seed region, in which the pattern of internucleotidic linkages comprises: SOSSS, where S is a phosphorothioate in the Sp configuration and O is phosphodiester.

[0896] In some embodiments, a provided single-stranded RNAi agent comprises a seed region, in which the pattern of internucleotidic linkages comprises: SOSS, where S is a phosphorothioate in the Sp configuration and O is phosphodiester.

[0897] In some embodiments, a provided single-stranded RNAi agent comprises a seed region, in which the pattern of internucleotidic linkages comprises the pattern of internucleotidic linkages in the seed region of a first single-stranded RNAi format shown in FIG. 1; and the pattern of 2′ modifications of the nucleotides comprises the pattern of 2′ modifications of the nucleotides in the seed region of a second single-stranded RNAi format shown in FIG. 1.

[0898] In some embodiments, a provided single-stranded RNAi agent comprises a seed region, in which the pattern of internucleotidic linkages comprises the pattern of internucleotidic linkages in the seed region of a first single-stranded RNAi format shown in FIG. 1; and the pattern of 2′ modifications of the nucleotides comprises the pattern of 2′ modifications of the nucleotides in the seed region of the first single-stranded RNAi format shown in FIG. 1.

[0899] Post-Seed Region of an APOC3 Oligonucleotide, Including a Single-Stranded RNAi Agent

[0900] In some embodiments, an APOC3 oligonucleotide, an APOC3 oligonucleotide that directs RNA interference, an APOC3 oligonucleotide that directs RNase H-mediated knockdown, or an APOC3 oligonucleotide that directs both RNA interference and RNase H-mediated knockdown can comprise any post-seed region or portion or structural element thereof described herein or known in the art.

[0901] In some embodiments of a single-stranded RNAi agent, a post-seed region comprises: a sequence of nucleotides comprising at least 1 2′-F modifications. In some embodiments of a single-stranded RNAi agent, a post-seed region comprises: a sequence of nucleotides comprising at least 2 to 20 2′-F modifications.

[0902] In some embodiments of a single-stranded RNAi agent, a post-seed region comprises: a sequence of nucleotides comprising at least 1 2′-OMe modifications. In some embodiments of a single-stranded RNAi agent, a post-seed region comprises: a sequence of nucleotides comprising at least 2 to 20 2′-OMe modifications.

[0903] In some embodiments of a single-stranded RNAi agent, a post-seed region comprises: a sequence of nucleotides comprising at least 1 total 2′-OMe and/or 2′-F modifications. In some embodiments of a single-stranded RNAi agent, a post-seed region comprises: a sequence of nucleotides comprising at least 2 to 20 total 2′-OMe and/or 2′-F modifications.

[0904] In some embodiments of a single-stranded RNAi agent, a post-seed region comprises: at least 2 to 10 consecutive pairs of nucleotides having 2′-F and 2′-OMe or 2′-OMe and 2′-F modifications.

[0905] In some embodiments of a single-stranded RNAi agent, a post-seed region comprises a pattern of alternating 2′-modifications, wherein the pattern comprises 2′-F, 2′-OMe, 2′-F, 2′-OMe. In some embodiments of a single-stranded RNAi agent, a post-seed region comprises a pattern of alternating 2′-modifications, wherein the pattern comprises 2′-F, 2′-OMe, 2′-F, 2′-OMe, 2′-F, 2′-OMe. In some embodiments of a single-stranded RNAi agent, a post-seed region comprises a pattern of alternating 2′-modifications, wherein the pattern comprises 2′-F, 2′-OMe, 2′-F, 2′-OMe, 2′-F, 2′-OMe, 2′-F, 2′-OMe. In some embodiments of a single-stranded RNAi agent, a post-seed region comprises a pattern of alternating 2′-modifications, wherein the pattern comprises 2′-F, 2′-OMe, 2′-F, 2′-OMe, 2′-F, 2′-OMe, 2′-F, 2′-OMe, 2′-F, 2′-OMe. In some embodiments of a single-stranded RNAi agent, a post-seed region comprises a pattern of alternating 2′-modifications, wherein the pattern comprises 2′-F, 2′-OMe, 2′-F, 2′-OMe, 2′-F, 2′-OMe, 2′-F, 2′-OMe, 2′-F, 2′-OMe, 2′-F, 2′-OMe. In some embodiments of a single-stranded RNAi agent, a post-seed region comprises a pattern of alternating 2′-modifications, wherein the pattern comprises 2′-F, 2′-OMe, 2′-F, 2′-OMe, 2′-F, 2′-OMe, 2′-F, 2′-OMe, 2′-F, 2′-OMe, 2′-F, 2′-OMe, 2′-F, 2′-OMe. In some embodiments of a single-stranded RNAi agent, a post-seed region comprises a pattern of alternating 2′-modifications, wherein the pattern comprises 2′-F, 2′-OMe, 2′-F, 2′-OMe, 2′-F, 2′-OMe, 2′-F, 2′-OMe, 2′-F, 2′-OMe, 2′-F, 2′-OMe, 2′-F, 2′-OMe, 2′-F, 2′-OMe. In some embodiments of a single-stranded RNAi agent, a post-seed region comprises a pattern of alternating 2′-modifications, wherein the pattern comprises 2′-F, 2′-OMe, 2′-F, 2′-OMe, 2′-F, 2′-OMe, 2′-F, 2′-OMe, 2′-F, 2′-OMe, 2′-F, 2′-OMe, 2′-F, 2′-OMe, 2′-F, 2′-OMe, 2′-F, 2′-OMe. In some embodiments of a single-stranded RNAi agent, a post-seed region comprises a pattern of alternating 2′-modifications, wherein the pattern comprises fmfmfmfmfm.

[0906] In some embodiments of a single-stranded RNAi agent, a post-seed region comprises a pattern of alternating 2′-modifications, wherein the pattern comprises mfmf, mfmfmf, mfmfmfmf, mfmfmfmfmf, mfmfmfmfmf, mfmfmfmfmfmf, mfmfmfmfmfmfmf, mfmfmfmfmfmfmfmf, mfmfmfmfmfmfmfmfmf, where m is 2′-OMe and f is 2′-F.

[0907] In some embodiments, each nucleotide in the seed region is 2′-OMe.

[0908] In some embodiments, each nucleotide in the seed region is 2′-OMe, and each nucleotide in the post-seed region is 2′-OMe.

[0909] In some embodiments, one nucleotide in the seed region is 2′-F and each other nucleotide in the seed region is 2′-OMe.

[0910] In some embodiments, one nucleotide in the seed region is 2′-F and each other nucleotide in the seed region is 2′-OMe, and one nucleotide in the post-seed region is 2′-F and each other nucleotide in the post-seed region is 2′-OMe.

[0911] In some embodiments, the nucleotide at position 2 (counting from the 5′-end) is 2′-F and each other nucleotide in the seed region is 2′-OMe, and one nucleotide in the post-seed region is 2′-F and each other nucleotide in the post-seed region is 2′-OMe.

[0912] In some embodiments, the nucleotide at position 2 (counting from the 5′-end) is 2′-F and each other nucleotide in the seed region is 2′-OMe, and the nucleotide at position 14 (counting from the 5′-end) is 2′-F and each other nucleotide in the post-seed region is 2′-OMe.

[0913] Without wishing to be bound by any particular theory, the present disclosure suggests that, in at least some cases, reducing the number of 2′-F nucleotides (e.g., replacing them with 2′-OMe, 2′-deoxy or any other nucleotide which is not 2′-F) can allow in vitro potency, and allow or increase stability, while reducing potential toxicity related to 2′-F.

[0914] In some embodiments, a post-seed region comprises at least 1, 2, 3, 4, 5 6, 7, 8 or 9 phosphorothioates and/or at least 1, 2, 3, 4, 5 6, 7, 8 or 9 phosphodiester internucleotidic linkages.

[0915] In some embodiments of a single-stranded RNAi agent, a post-seed region comprises one or more sets of consecutive phosphorothioates and/or one or more sets of consecutive phosphodiesters.

[0916] In some embodiments, a single-stranded RNAi agent comprises a post-seed region which comprises a span of sugars having a pattern of modifications of any of: mfmfmfmfmfmfm, mfmfmfmfmfm, mfmfmfmfm, mfmfmfm, mfmfm, mfm, fmfmfmfmfmfm, fmfmfmfmfm, fmfmfmfm, fmfmfm, and fmfm, wherein m is 2′-OMe and f is 2′-F.

[0917] In some embodiments, a single-stranded RNAi agent comprises a post-seed region which comprises a span of sugars having a pattern of modifications of any of: dddfdfdfdfdfd, dddfdfdfdfd, dddfdfdfd, dddfdfd, and dddfd, wherein d is 2′-deoxy and f is 2′-F.

[0918] In some embodiments, a single-stranded RNAi agent comprises a post-seed region which comprises a span of sugars having a pattern of modifications of any of: dfdfdfdfdfdfd, fdfdfdfdfdfd, and fdfdfdfdfd.

[0919] In some embodiments, a single-stranded RNAi agent comprises a post-seed region which comprises a span of sugars having a pattern of modifications of any of: fdfdfdfd, fdfdfd, and fdfd.

[0920] In some embodiments, a single-stranded RNAi agent comprises a post-seed region which comprises a span of internucleotidic linkages having a pattern of any of: XOXOXOXOOOO, OXOXOXOOOO, XOXOXOXOOO, XOXOXOXOO, XOXOXOOOO, OXOXOXOO, XOXOXOOO, OXOXOOOO, OXOXOOO, and XOXOOO, wherein O is phosphodiester and X is a stereorandom phosphorothioate.

[0921] In some embodiments, a single-stranded RNAi agent comprises a post-seed region which comprises a span of internucleotidic linkages having a pattern of OOOOOOO.

[0922] In some embodiments, a single-stranded RNAi agent comprises a post-seed region which comprises a span of internucleotidic linkages having a pattern of any of: OOOOOO, OOOOO, OOOO, and OOO.

[0923] In some embodiments, a single-stranded RNAi agent comprises a post-seed region which comprises a span of internucleotidic linkages having a pattern of any of: OOOOOOOOXXXXXX, OOOOOOOOXXXXX, OOOOOOOOXXXX, OOOOOOOOXXX, OOOOOOOOXX, OOOOOOOOX, OOOOOOOXXXXXX, OOOOOOXXXXXX, OOOOOXXXXXX, OOOOXXXXXX, OOOXXXXXX, OOXXXXXX, OXXXXXX, OOOOOOX, OOOOOX, OOOOX, and OOOX.

[0924] In some embodiments, a single-stranded RNAi agent comprises a post-seed region which comprises a span of internucleotidic linkages having a pattern of any of: OOOOOOOXXXXX, OOOOOOOXXXX, OOOOOOOXXX, OOOOOOXXXXX, OOOOOOXXXX, OOOOOXXXXX, OOOOOXXXX, OOOOOXXX, OOOOXXXX, OOOOXXX, OOOXXXXX, OOOXXXX, and OOOXXX.

[0925] In some embodiments, a single-stranded RNAi agent comprises a post-seed region which comprises at least one chiral internucleotidic linkage. In some embodiments, a single-stranded RNAi agent comprises a post-seed region which comprises at least one chirally controlled internucleotidic linkage. In some embodiments, a single-stranded RNAi agent comprises a post-seed region which comprises at least one chirally controlled internucleotidic linkage which is a phosphorothioate. In some embodiments, a single-stranded RNAi agent comprises a post-seed region which comprises at least one chirally controlled internucleotidic linkage which is a phosphorothioate in the Sp configuration. In some embodiments, a single-stranded RNAi agent comprises a post-seed region which comprises at least one chirally controlled internucleotidic linkage which is a phosphorothioate in the Rp configuration.

[0926] In some embodiments, a single-stranded RNAi agent comprises a post-seed region which comprises a span of internucleotidic linkages having a pattern of any of: OSSSOSSSSSSSSSS, OSSSOSSSSSSSSS, OSSSOSSSSSSSS, OSSSOSSSSSSS, OSSSOSSSSSS, OSSSOSSSSS, OSSSOSSSS, OSSSOSSS, OSSSOSS, OSSSOS, and OSSSO, wherein O is phosphodiester and S is a phosphorothioate in the Sp configuration.

[0927] In some embodiments, a single-stranded RNAi agent comprises a post-seed region which comprises a span of internucleotidic linkages having a pattern of any of: OSOSOSOSSSSSSSS, OSOSOSOSSSSSSS, OSOSOSOSSSSSS, OSOSOSOSSSSS, OSOSOSOSSSS, OSOSOSOSSS, and OSOSOSOSS.

[0928] In some embodiments, a single-stranded RNAi agent comprises a post-seed region which comprises a span of internucleotidic linkages having a pattern of any of: SOSOSOSSSSSSSS, OSOSOSSSSSSSS, SOSOSSSSSSSS, OSOSSSSSSSS, SOSSSSSSSS, and OSSSSSSSS.

[0929] In some embodiments, a single-stranded RNAi agent comprises a post-seed region which comprises a span of internucleotidic linkages having a pattern of any of: SOSOSOSSSSSSSS, SOSOSOSSSSSSS, SOSOSOSSSSSS, SOSOSOSSSSS, SOSOSOSSSS, SOSOSOSSS, SSSSSSSS, SSSSSSS, SSSSSS, SSSSS, SSSS, SSS, and SS.

[0930] In some embodiments, a single-stranded RNAi agent comprises a post-seed region which comprises a span of internucleotidic linkages having a pattern of any of: OSSSSSO, OSSSSS, OSSSS, SSSSSO, SSSSO, and SSSO.

[0931] In some embodiments, a single-stranded RNAi agent comprises a post-seed region which comprises a span of internucleotidic linkages having a pattern of any of: SOSOSOSOSOOOOOOS, SOSOSOSOSOOOOOO, SOSOSOSOSOOOOO, SOSOSOSOSOOOO, SOSOSOSOSOOO, and SOSOSOSOSOO.

[0932] In some embodiments, a single-stranded RNAi agent comprises a post-seed region which comprises a span of internucleotidic linkages having a pattern of any of: OSOSOSOSOOOOOOS, SOSOSOSOOOOOOS, OSOSOSOOOOOOS, SOSOSOOOOOOS, OSOSOOOOOOS, SOSOOOOOOS, and OSOOOOOOS.

[0933] In some embodiments, a single-stranded RNAi agent comprises a post-seed region which comprises a span of internucleotidic linkages having a pattern of any of: XOOOXOOXXXXX, XOOOXOOXXXX, XOOOXOOXXX, XOOOXOOXX, XOOOXOOX, XOOOXOO, OOOXOOXXXXX, OOXOOXXXXX, OXOOXXXXX, XOOXXXXX, and OOXXXXX.

[0934] In some embodiments, a single-stranded RNAi agent comprises a post-seed region which comprises a span of internucleotidic linkages having a pattern of any of: XOXOXOXXXXXX, XOXOXOXXXXX, XOXOXOXXXX, XOXOXOXXX, XOXOXOXX, XOXOXOX, OXOXOXXXXXX, XOXOXXXXXX, OXOXXXXXX, XOXXXXXX, and OXXXXXX.

[0935] In some embodiments, a single-stranded RNAi agent comprises a post-seed region which comprises a span of internucleotidic linkages having a pattern of any of: XXXOOOXOXOXXX, XXXOOOXOXOXX, XXXOOOXOXOX, XXXOOOXOXO, XXXOOOXOX, XXXOOOXO, XXOOOXOXOXXX, XOOOXOXOXXX, OOOXOXOXXX, OOXOXOXXX, OXOXOXXX, XOXOXXX, XXOOOXOXOXX, XXOOOXOXOX, XOOOXOXOXX, and XOOOXOXOX.

[0936] In some embodiments, a single-stranded RNAi agent comprises a post-seed region which comprises a span of internucleotidic linkages having a pattern of any of: XOOOXOXO, XOOOXOX, XOOOXO, OOOXOXO, OOOXOX, and OOOXO.

[0937] In some embodiments, a single-stranded RNAi agent comprises a post-seed region which comprises a span of internucleotidic linkages having a pattern of any of: XOXOOOXOXOXXX, XOXOOOXOXOXX, XOXOOOXOXOX, XOXOOOXOXO, XOXOOOXOX, XOXOOOXO, XOXOOOX, OXOOOXOXOXXX, XOOOXOXOXXX, OOOXOXOXXX, OOXOXOXXX, OXOXOXXX, OXOOOXOXOXX, OXOOOXOXOX, XOOOXOXOXX, and XOOOXOXOX.

[0938] In some embodiments, a single-stranded RNAi agent comprises a post-seed region which comprises a span of internucleotidic linkages having a pattern of any of: OOOOOOS, OOOOOSO, OOOOSOO, OOOSOOO, OOSOOOO, OSOOOOO, and SOOOOOO.

[0939] In some embodiments, a hybrid oligonucleotide comprises a (a) seed region capable of annealing to a first complementary target mRNA region; and (b) a post-seed region comprising a 2′-deoxy region, wherein the hybrid oligonucleotide is capable of directing both RNA interference and RNase H-mediated knockdown, wherein the 2′-deoxy region comprises at least 5 consecutive 2′-deoxy. In some embodiments, the 2′-deoxy can be DNA, or a modified nucleotide, e.g., a modified nucleotide with a 2′-deoxy, wherein the DNA or modified nucleotide comprise a natural sugar and/or a natural base, and/or a modified base, and/or any internucleotidic linkage. In some embodiments, the 2′-deoxy region comprises a stretch of consecutive nucleotides, wherein each nucleotide is 2′-deoxy and each internucleotidic linkage is a phosphorothioate. In some embodiments, the 2′-deoxy region comprises a stretch of consecutive nucleotides of at least 5, 6, 7, 8, 9, 10, 11, 12, 13, 14, 15, 16, 17, 18, 19, 20 or 21 nucleotides, wherein each nucleotide is 2′-deoxy and each internucleotidic linkage is a phosphorothioate.

[0940] As non-limiting examples of a post-seed region in a single-stranded RNAi agent: Formats 2, 7, 8, 9, 12 and 13 (which each comprise a set of 6 consecutive phosphodiesters; and a set of 6 consecutive phosphodithioates), Format 3 (6 consecutive phosphorodithioates), Formats 4, 5 and 6, Formats 10 and 11; and various other single-stranded RNAi agents disclosed herein.

[0941] In some embodiments of a single-stranded RNAi agent, a post-seed region comprises a mismatch at the most 3′ position.

[0942] In some embodiments, a provided single-stranded RNAi agent can comprise a mismatch at any one or more of: the 5′ position, either or both of the 3′-terminal dinucleotide, and the most 3′ position of the region between the seed region and the 3′-end region.

[0943] In some embodiments, an APOC3 oligonucleotide, an APOC3 oligonucleotide that directs RNA interference, an APOC3 oligonucleotide that directs RNase H-mediated knockdown, or an APOC3 oligonucleotide that directs both RNA interference and RNase H-mediated knockdown can comprise any post-seed region or portion or structural element thereof described herein or known in the art.

[0944] 3′-End Region of an APOC3 Oligonucleotide, Including a Single-Stranded RNAi Agent

[0945] In some embodiments, provided oligonucleotides are capable of directing a decrease in the expression and/or level of a target gene or its gene product. In some embodiments, provided oligonucleotides are capable of directing a decrease in the expression and/or level of a target gene or its gene product via RNA interference. In some embodiments, provided oligonucleotides are capable of directing a decrease in the expression and/or level of a target gene or its gene product via a biochemical mechanism which does not involve RNA interference or RISC (including, but not limited to, RNaseH-mediated knockdown or steric hindrance of gene expression). In some embodiments, provided oligonucleotides are capable of directing a decrease in the expression and/or level of a target gene or its gene product via RNA interference and/or RNase H-mediated knockdown. In some embodiments, provided oligonucleotides are capable of directing a decrease in the expression and/or level of a target gene or its gene product by sterically blocking translation after annealing to a target gene mRNA, and/or by altering or interfering with mRNA splicing and/or exon inclusion or exclusion. In some embodiments, provided oligonucleotides can comprise any 3′-end region described herein or known in the art.

[0946] In some embodiments, the 3′-end region of an APOC3 oligonucleotide is such that the oligonucleotide is capable of directing a decrease in the expression and/or level of a target gene or its gene product.

[0947] In some embodiments, the 3′-end region of a RNAi agent is such that the RNAi agent is capable of directing RNA interference of a specific target transcript in a sequence-specific manner.

[0948] In some embodiments, an APOC3 oligonucleotide, an APOC3 oligonucleotide that directs RNA interference, an APOC3 oligonucleotide that directs RNase H-mediated knockdown, or an APOC3 oligonucleotide that directs both RNA interference and RNase H-mediated knockdown can comprise any 3′-end region and/or 3′-terminal dinucleotide and/or 3′-end cap described herein or known in the art. In some embodiments, a 3′-end region can comprise a GalNAc moiety. In some embodiments, a GalNAc moiety is any GalNAc, or variant, derivative or modification thereof, as described herein or known in the art.

[0949] In some embodiments, a 3′-end region and/or 3′-terminal dinucleotide and/or 3′-end cap performs two functions: (a) decreasing the sensitivity of the oligonucleotide to exo- and/or endonucleases; and (b) allowing the function of the oligonucleotide, wherein the function is directing RNA interference, directing RNase H-mediated knockdown, or directing both RNA interference and RNase H-mediated knockdown.

[0950] Thus, the 3′-end region of the single-stranded RNAi agent can comprise a 3′-terminal dinucleotide and/or a 3′-end cap.

[0951] In a mammalian cell, Dicer reportedly processes double-stranded RNA (dsRNA) into 19-23 base pair siRNAs, which comprise a double-stranded region, with each strand terminating in a single-stranded 3′ overhang, which can be 1 to 4 nt long, but is typically a 3′-terminal dinucleotide. Bernstein et al. 2001 Nature 409: 363; Elbashir et al. 2001 Nature 411: 494-498; Elbashir et al. 2001 EMBO J. 20: 6877. The two dinucleotide overhangs reportedly do not contribute to target specificity. They do, however, reportedly help protect the ends of the siRNA from nuclease degradation and sometimes improve activity. Elbashir et al. 2001 Nature 411: 494-498; Elbashir et al. 2001 EMBO J. 20: 6877-6888; and Kraynack et al. 2006 RNA 12:163-176. Thus, it is reportedly not necessary for a functional double-stranded RNAi agent for a 3′-terminal dinucleotide to comprise a sequence complementary to the target gene sequence.

[0952] In artificial double-stranded RNAi agents, the 3′ single-stranded dinucleotide overhangs have reportedly been experimentally replaced with various moieties, including other single-stranded dinucleotides, nucleotides, and 3′-end caps. The 3′-terminal dinucleotides of a 21-mer are reportedly often replaced by an artificial dinucleotide, such as UU, TT, dTdT, sdT, dTsdT, sdTsdT, or sdTdT. Replacing up to four nucleotides on each end of the siRNA with deoxyribonucleotides has reportedly been well tolerated, whereas complete substitution with deoxyribonucleotides results in no RNAi activity. International PCT Publication No. WO 00/44914, and Beach et al. International PCT Publication No. WO 01/68836 preliminarily reported that siRNA may include modifications to either the phosphate-sugar backbone or the nucleoside to include at least one of a nitrogen or sulfur heteroatom. Kreutzer et al. Canadian Patent Application No. 2,359,180, also report certain chemical modifications for use in dsRNA constructs in order to counteract activation of double-stranded RNA-dependent protein kinase PKR, specifically 2′-amino or 2-O-methyl nucleotides, and nucleotides containing a 2′-0 or 4′—C methylene bridge. Additional 3¹-terminal nucleotide overhangs include dT (deoxythimidine), 2′-0,4′—C-ethylene thymidine (eT), and 2-hydroxyethyl phosphate (hp). Other artificial 3′ overhangs (3′-terminal dinucleotides) include dinucleotides of sequences AA, CC, GG, and UG. Elbashir et al. 2001 EMBO J. 20: 6877-6888. In some embodiments, a 3′-terminal dinucleotide reportedly is AA.

[0953] Alternatively, in a double-stranded RNAi agent, one or both of the 3′-terminal dinucleotides can reportedly be deleted (and not replaced), leaving a functional siRNA comprising two 19-nt strands forming a 19-bp blunt-ended duplex. Deleting and not replacing the 3′-terminal dinucleotide in a double-stranded RNAi agent reportedly leaves the ends of the strands vulnerable to nucleases; to compensate for this, an artificial 3′-end cap can be added. The 3′-end caps are reportedly non-nucleotidic; they are not nucleotides as they do not comprise all components of a nucleotide (phosphate, sugar and base). The dinucleotide overhangs in a double-stranded RNAi agent can reportedly sometimes functionally be replaced by a 3′-end cap, leaving a blunt-ended 19-bp duplex with one or two 3′-end caps, which can protect the molecule from nucleases. In general, a 3′-end cap reportedly must not prevent RNA interference mediated by the RNAi agent; many 3′-end caps also impart an added advantage, such as increased RNAi activity and/or stability against nucleases.

[0954] Without wishing to be bound by any particular theory, the present application notes that in at least some cases, previously-described 3′-end caps reportedly are theorized to interact with a PAZ domain. In some embodiments, a 3′-end cap is reportedly a PAZ ligand. WO 2015/051366. Reportedly, Dicer is an RNase III enzyme and is composed of six recognizable domains. Reportedly, at or near the N-terminus is an approx. 550 aa DExH-box RNA helicase domain, which is immediately followed by a conserved approx. 100 aa domain called DUF283; just C-terminal to DUF283 domain is the PAZ (for Piwi/Argonaute/Zwille) domain, which recognizes single stranded dinucleotide overhangs. Myers et al. 2005. in RNA interference Technology, ed. Appasani, Cambridge University Press, Cambridge UK, p. 29-54; Bernstein et al. 2001 Nature 409: 363-366; and Schauer et al. 2002 Trends Plant Sci. 7: 487-491; Lingel et al. 2003 Nature 426: 465-469; Song et al. 2003 Nature Struct. Biol. 10: 1026-1032; Yan et al. 2003 Nature 426: 468-474; Lingel et al. 2004 Nature Struct. Mol. Biol. 11: 576-577; Ma et al. 2004 Nature 429: 318-322. Reportedly, the PAZ domain in Dicer could also bind RNA to position the catalytic domains for cleavage. Zhang et al. 2004 Cell 1 18: 57-68. In some embodiments, a 3′-end cap is a PAZ ligand which interacts with a PAZ domain.

[0955] In some embodiments, a 3′-end cap can allow two functions: (1) allowing RNA interference; and (2) increasing duration of activity and/or biological half-life, which may be accomplished, for example, by increased binding to the PAZ domain of Dicer and/or reducing or preventing degradation of the RNAi agent (e.g., by nucleases such as those in the serum or intestinal fluid).

[0956] Various 3′-terminal dinucleotides are described in the oligonucleotides listed in Table 1A.

[0957] In some embodiments, a provided single-stranded RNAi agent comprises a pair of 3′-terminal nucleotides. The penultimate nucleotide is 2′-OMe and the 5′ nucleotide is 2′-OMe.

[0958] In some embodiments, a provided single-stranded RNAi agent comprises a pair of 3′-terminal nucleotides and the penultimate nucleotide is 2′-deoxy and the 5′ nucleotide is 2′-OMe. Non-limiting examples of single-stranded RNAi agents disclosed herein of this structure include: Formats 10, 11, 13 and 14, FIG. 1; and various other single-stranded RNAi agents disclosed herein.

[0959] In some embodiments, a provided single-stranded RNAi agent comprises a pair of 3′-terminal nucleotides and the penultimate nucleotide is 2′-deoxy and the 5′ nucleotide is 2′-OMe, and wherein the penultimate nucleotide comprises a linker.

[0960] In some embodiments, a provided single-stranded RNAi agent comprises a pair of 3′-terminal nucleotides and wherein the penultimate nucleotide comprises a linker.

[0961] In some embodiments, a provided single-stranded RNAi agent comprises a pair of 3′-terminal nucleotides and the penultimate nucleotide is 2′-deoxy and the 5′ nucleotide is 2′-OMe, and wherein the penultimate nucleotide comprises a linker conjugated to an additional chemical moiety.

[0962] In some embodiments, a provided single-stranded RNAi agent comprises a pair of 3′-terminal nucleotides and the penultimate nucleotide is 2′-deoxy T and the 5′ nucleotide is 2′-OMe U, and wherein the penultimate nucleotide comprises a linker conjugated to an additional chemical moiety.

[0963] In some embodiments, a provided single-stranded RNAi agent comprises a pair of 3′-terminal nucleotides and wherein the penultimate nucleotide comprises a linker conjugated to an additional chemical moiety selected from: a targeting moiety, a lipid moiety, a carbohydrate moiety, a bicyclic ketal, and a GalNAc moiety.

[0964] In some embodiments, a provided single-stranded RNAi agent comprises a pair of 3′-terminal nucleotides and the penultimate nucleotide is 2′-deoxy and the 5′ nucleotide is 2′-OMe, and wherein the penultimate nucleotide comprises a linker conjugated to an additional chemical moiety selected from: a targeting moiety, a lipid moiety, a carbohydrate moiety, a bicyclic ketal, and a GalNAc moiety.

[0965] In some embodiments, a provided single-stranded RNAi agent comprises a pair of 3′-terminal nucleotides and the penultimate nucleotide is 2′-deoxy T and the 5′ nucleotide is 2′-OMe U, and wherein the penultimate nucleotide comprises a linker conjugated to an additional chemical moiety selected from: a targeting moiety, a lipid moiety, a carbohydrate moiety, a bicyclic ketal, and a GalNAc moiety.

[0966] In some embodiments, a 3′-end region or 3′-end cap comprises a GN3, or any other suitable RNAi agent 3′-end region compound as described in, for example, Allerson et al. 2005 J. Med. Chem. 48: 901-04; Lima et al. 2012 Cell 150: 883-894; Prakash et al. 2015 Nucl. Acids Res. 43: 2993-3011; and/or Prakash et al. 2016 Bioorg. Med. Chem. Lett. 26: 26: 2817-2820.

[0967] Various 3′-end caps have been described in the literature.

[0968] Generally, a 3′-end cap is joined to the 3′-terminal internucleotidic linkage. The 3′-terminal internucleotidic linkage can be selected from: a phosphodiester, a phosphorothioate, a phosphodithioate, and any internucleotidic linkage described herein.

[0969] A 3′-end cap for a provided single-stranded RNAi agent can be selected from, for example, any 3′-end cap described herein.

[0970] In some embodiments, a 3′-end cap is selected from: 2′,3′-cyclic phosphate, C3 (or C6, C7, C12) aminolinker, thiol linker, carboxyl linker, non-nucleotidic spacers (C3, C6, C9, C12, abasic, triethylene glycol, hexaethylene glycol), biotin, and fluoresceine.

[0971] In some embodiments, a 3′-end cap is selected from any 3′-end cap described in WO 2015/051366, including but not limited to C3, amino C3, C6, C8, C10, and C12. In some embodiments, a 3′-end cap is selected from: Triethylene glycol, Cyclohexyl (or Cyclohex), Phenyl, BP (Biphenyl), Adamantane and Lithocholic acid (or Lithochol), as described in U.S. Pat. Nos. 8,097,716; 8,084,600; 8,344,128; 8,404,831; and 8,404,832.

[0972] Various functional 3′-end caps suitable for a provided RNAi agent are described in, for example, EP 1520022 B1; U.S. Pat. Nos. 8,097,716, 8,084,600; 8,404,831; 8,404,832, and 8,344,128; and WO 2015/051366.

[0973] In addition, the present disclosure notes that disclosed herein are various 5′-end structures and 3′-end regions, and combinations thereof, which function in single-stranded RNAi agents. However, it is noted, in contrast, many 5′-end structures and 3′-end caps, and combinations thereof, have previously been reported to reduce or eliminate the RNA interference ability of various double-stranded RNAi agents. See, for example, Czauderna et al. 2003 Nucl. Acids Res. 31:2705-2716; Hadwiger et al. 2005, pages 194-206, in RNA interference Technology, ed. K. Appasani, Cambridge University Press, Cambridge, UK; Deleavey et al. 2009 Curr. Prot. Nucl. Acid Chem. 16.3.1-16.3.22; Terrazas et al. 2009 Nucleic Acids Res. 37: 346-353; Harboth et al. 2003 Antisense Nucl. Acid Drug Dev 13: 83-105; Song et al. 2003 Nature Med. 9: 347-351; U.S. Pat. No. 5,998,203; Lipardi et al. 2001 Cell 107: 299-307; Schwarz et al. 2002 Mol. Cell 10: 537-548; and WO 2015/051366.

[0974] a bicyclic ketal,

[0975] Additional Optional Structural Elements of an APOC3 Oligonucleotide

[0976] In some embodiments, an APOC3 oligonucleotide, an APOC3 oligonucleotide capable of directing a decrease in the expression and/or level of a target gene or its gene product can comprise any structural element or pattern thereof described herein or known in the art.

[0977] a bicyclic ketal,

[0978] Optional Additional Chemical Moiety Conjugated to an APOC3 Oligonucleotide

[0979] In some embodiments, provided oligonucleotides are capable of directing a decrease in the expression and/or level of a target gene or its gene product. In some embodiments, provided oligonucleotides are capable of directing a decrease in the expression and/or level of a target gene or its gene product via RNA interference. In some embodiments, provided oligonucleotides are capable of directing a decrease in the expression and/or level of a target gene or its gene product via a biochemical mechanism which does not involve RNA interference or RISC (including, but not limited to, RNaseH-mediated knockdown or steric hindrance of gene expression). In some embodiments, provided oligonucleotides are capable of directing a decrease in the expression and/or level of a target gene or its gene product via RNA interference and/or RNase H-mediated knockdown. In some embodiments, provided oligonucleotides are capable of directing a decrease in the expression and/or level of a target gene or its gene product by sterically blocking translation after annealing to a target gene mRNA, and/or by altering or interfering with mRNA splicing and/or exon inclusion or exclusion. In some embodiments, provided oligonucleotides can comprise any optional additional chemical moiety, including but not limited to, a targeting moiety, a lipid moiety, a carbohydrate moiety, a bicyclic ketal, a GalNAc moiety, etc., described herein or known in the art.

[0980] In some embodiments, an APOC3 oligonucleotide, an APOC3 oligonucleotide that is capable of directing a decrease in the expression and/or level of a target gene or its gene product can comprise any optional additional chemical moiety, including but not limited to, a targeting moiety, a lipid moiety, a carbohydrate moiety, a bicyclic ketal, a GalNAc moiety, etc., described herein or known in the art.

[0981] In some embodiments, an APOC3 oligonucleotide, an APOC3 oligonucleotide that directs RNA interference, an APOC3 oligonucleotide that directs RNase H-mediated knockdown, or an APOC3 oligonucleotide that directs both RNA interference and RNase H-mediated knockdown can comprise any optional additional chemical moiety, including but not limited to, a targeting moiety, a lipid moiety, a carbohydrate moiety, a bicyclic ketal, a GalNAc moiety, etc., described herein or known in the art.

[0982] In some embodiments, an additional chemical moiety is conjugated to single-stranded RNAi agent.

[0983] Optional Additional Chemical Moiety Conjugated to an APOC3 Oligonucleotide: A Targeting Moiety

[0984] In some embodiments, a provided oligonucleotide composition further comprises a targeting moiety (e.g., a targeting compound, agent, ligand, or component). A targeting moiety can be either conjugated or not conjugated to a lipid or an APOC3 oligonucleotide or single-stranded RNAi agent. In some embodiments, a targeting moiety is conjugated to an APOC3 oligonucleotide or single-stranded RNAi agent. In some embodiments, an APOC3 oligonucleotide or single-stranded RNAi agent is conjugated to both a lipid and a targeting moiety. As described in here, in some embodiments, an APOC3 oligonucleotide or single-stranded RNAi agent is a provided oligonucleotide. Thus, in some embodiments, a provided oligonucleotide composition further comprises, besides a lipid and oligonucleotides, a target elements. Various targeting moieties can be used in accordance with the present disclosure, e.g., lipids, antibodies, peptides, carbohydrates, etc.

[0985] Targeting moieties can be incorporated into provided technologies through many types of methods in accordance with the present disclosure. In some embodiments, targeting moieties are physically mixed with provided oligonucleotides to form provided compositions. In some embodiments, targeting moieties are chemically conjugated with oligonucleotides.

[0986] In some embodiments, provided compositions comprise two or more targeting moieties.

[0987] In some embodiments, provided oligonucleotides comprise two or more conjugated targeting moieties. In some embodiments, the two or more conjugated targeting moieties are the same. In some embodiments, the two or more conjugated targeting moieties are different. In some embodiments, provided oligonucleotides comprise no more than one target component. In some embodiments, oligonucleotides of a provided composition comprise different types of conjugated targeting moieties. In some embodiments, oligonucleotides of a provided composition comprise the same type of targeting moieties.

[0988] In some embodiments, provided compositions comprise two or more targeting moieties.

[0989] In some embodiments, provided oligonucleotides capable of directing single-stranded RNA interference comprise two or more conjugated targeting moieties. In some embodiments, the two or more conjugated targeting moieties are the same. In some embodiments, the two or more conjugated targeting moieties are different. In some embodiments, provided oligonucleotides capable of directing single-stranded RNA interference comprise no more than one target component. In some embodiments, oligonucleotides of a provided composition comprise different types of conjugated targeting moieties. In some embodiments, oligonucleotides of a provided composition comprise the same type of targeting moieties.

[0990] Targeting moieties can be conjugated to oligonucleotides optionally through linkers.

[0991] Various types of linkers in the art can be utilized in accordance of the present disclosure. In some embodiments, a linker comprise a phosphate group, which can, for example, be used for conjugating targeting moieties through chemistry similar to those employed in oligonucleotide synthesis. In some embodiments, a linker comprises an amide, ester, or ether group. In some embodiments, a linker has the structure of -L-. Targeting moieties can be conjugated through either the same or different linkers compared to lipids.

[0992] Targeting moieties, optionally through linkers, can be conjugated to oligonucleotides at various suitable locations. In some embodiments, targeting moieties are conjugated through the 5′—OH group. In some embodiments, targeting moieties are conjugated through the 3′—OH group. In some embodiments, targeting moieties are conjugated through one or more sugar moieties. In some embodiments, targeting moieties are conjugated through one or more bases. In some embodiments, targeting moieties are incorporated through one or more internucleotidic linkages. In some embodiments, an APOC3 oligonucleotide may contain multiple conjugated targeting moieties which are independently conjugated through its 5′-OH, 3′-OH, sugar moieties, base moieties and/or internucleotidic linkages. Targeting moieties and lipids can be conjugated either at the same, neighboring and/or separated locations. In some embodiments, a target component is conjugated at one end of an APOC3 oligonucleotide, and a lipid is conjugated at the other end.

[0993] In some embodiments, a provided composition further comprises a targeting component or moiety. A targeting component can be either incorporated into (targeting moiety) or not incorporated into an APOC3 oligonucleotide. In some embodiments, a targeting component is a lipid. In some embodiments, a targeting component is a carbohydrate or a bicyclic ketal. In some embodiments, a targeting component is —R^{LD} as described in the present disclosure. In some embodiments, a targeting component is —R^{CD} as described in the present disclosure.

[0994] Targeting components can be incorporated into provided technologies through many types of methods in accordance with the present disclosure, for example, those described for lipids and carbohydrates. In some embodiments, targeting components are physically mixed with provided oligonucleotides to form provided compositions. In some embodiments, targeting components are chemically conjugated with oligonucleotide moieties.

[0995] In some embodiments, provided compositions comprise two or more targeting components. In some embodiments, provided oligonucleotides comprise two or more conjugated targeting components. In some embodiments, the two or more conjugated targeting components are the same. In some embodiments, the two or more conjugated targeting components are different. In some embodiments, provided oligonucleotides comprise no more than one targeting component. In some embodiments, oligonucleotides of a provided composition comprise different types of conjugated targeting components. In some embodiments, oligonucleotides of a provided composition comprise the same type of targeting components.

[0996] Targeting components can be conjugated to oligonucleotides optionally through linkers, for example, as described for lipids and carbohydrates. Various types of linkers in the art can be utilized in accordance of the present disclosure. In some embodiments, a linker comprise a phosphate group, which can, for example, be used for conjugating targeting components through chemistry similar to those employed in oligonucleotide synthesis. In some embodiments, a linker comprises an amide, ester, or ether group. In some embodiments, a linker has the structure of -L-. Targeting components can be conjugated through either the same or different linkers compared to lipids.

[0997] Targeting components, optionally through linkers, can be conjugated to oligonucleotides at various suitable locations. In some embodiments, targeting components are conjugated through the 5′-OH group. In some embodiments, targeting components are conjugated through the 3′—OH group. In some embodiments, targeting components are conjugated through one or more sugar moieties. In some embodiments, targeting components are conjugated through one or more bases. In some embodiments, targeting components are incorporated through one or more internucleotidic linkages. In some embodiments, an APOC3 oligonucleotide may contain multiple conjugated targeting components which are independently conjugated through its 5′-OH, 3′-OH, sugar moieties, base moieties and/or internucleotidic linkages. Targeting components and lipids can be conjugated either at the same, neighboring and/or separated locations. In some embodiments, a targeting component is conjugated at one end of an APOC3 oligonucleotide, and a lipid is conjugated at the other end.

[0998] In some embodiments, a targeting component interacts with a protein on the surface of targeted cells. In some embodiments, such interaction facilitates internalization into targeted cells. In some embodiments, a targeting component comprises a sugar moiety. In some embodiments, a targeting component comprises a polypeptide moiety. In some embodiments, a targeting component comprises an antibody. In some embodiments, a targeting component is an antibody. In some embodiments, a targeting component comprises an inhibitor. In some embodiments, a targeting component is a moiety from a small molecule inhibitor. In some embodiments, an inhibitor is an inhibitor of a protein on the surface of targeted cells. In some embodiments, an inhibitor is a carbonic anhydrase inhibitor. In some embodiments, an inhibitor is a carbonic anhydrase inhibitor expressed on the surface of target cells. In some embodiments, a carbonic anhydrase is I, II, III, IV, V, VI, VII, VIII, IX, X, XI, XII, XIII, XIV, XV or XVI. In some embodiments, a carbonic anhydrase is membrane bound. In some embodiments, a carbonic anhydrase is IV, IX, XII or XIV. In some embodiments, an inhibitor is for IV, IX, XII and/or XIV. In some embodiments, an inhibitor is a carbonic anhydrase III inhibitor. In some embodiments, an inhibitor is a carbonic anhydrase IV inhibitor. In some embodiments, an inhibitor is a carbonic anhydrase IX inhibitor. In some embodiments, an inhibitor is a carbonic anhydrase XII inhibitor. In some embodiments, an inhibitor is a carbonic anhydrase XIV inhibitor. In some embodiments, an inhibitor comprises or is a sulfonamide (e.g., those described in Supuran, Conn. Nature Rev Drug Discover 2008, 7, 168-181, which sulfonamides are incorporated herein by reference). In some embodiments, an inhibitor is a sulfonamide. In some embodiments, targeted cells are muscle cells.

[0999] In some embodiments, a targeting component is R^{TD}, wherein R^{TD} is R^{LD} or R^{CD} as described in the present disclosure.

[1000] In some embodiments, a targeting component is R^{LD} as defined and described in the present disclosure. In some embodiments, the present disclosure provides oligonucleotides comprising R^{LD}. In some embodiments, the present disclosure provides oligonucleotide compositions comprising oligonucleotides comprising R^{LD}. In some embodiments, the present disclosure provides oligonucleotide compositions comprising a first plurality of oligonucleotides comprising R^{LD}. In some embodiments, the present disclosure provides chirally controlled oligonucleotide compositions of oligonucleotides comprising R^{LD}.

[1001] In some embodiments, a targeting component is R^{CD} as defined and described in the present disclosure. In some embodiments, the present disclosure provides oligonucleotides comprising R^{CD}. In some embodiments, the present disclosure provides oligonucleotide compositions comprising oligonucleotides comprising R^{CD}. In some embodiments, the present disclosure provides oligonucleotide compositions comprising a first plurality of oligonucleotides comprising R^{CD}. In some embodiments, the present disclosure provides chirally controlled oligonucleotide compositions of oligonucleotides comprising R^{CD}.

[1002] In some embodiments, R^{TD} comprises or is

[chemical structure]

In some embodiments, R^{TD} comprises or is

[chemical structure]

In some embodiments, R^{TD} comprises or is

[chemical structure]

In some embodiments, R^{TD} comprises or is

[chemical structure]

In some embodiments, R^{TD} comprises or is

[chemical structure]

In some embodiments, R^{TD} comprises or is

[chemical structure]

In some embodiments, R^{TD} comprises or is

[chemical structure]

In some embodiments, R^{TD} comprises or is

[chemical structure]

In some embodiments, R^{TD} comprises or is

[chemical structure]

In some embodiments, R^{TD} comprises or is

[chemical structure]

In some embodiments, R^{TD} comprises or is

[chemical structure]

In some embodiments, R^{TD} comprises or is

[chemical structure]

In some embodiments, R^{TD} comprises or is

[chemical structure]

In some embodiments, R^{TD} comprises or is

[chemical structure]

X═O or S. In some embodiments, R^{TD} comprises or is

[chemical structure]

In some embodiments, R^{TD} is a targeting component that comprises or is a lipid moiety. In some embodiments, X is O. In some embodiments, X is S.

[1003] In some embodiments, the present disclosure provides technologies (e.g., reagents, methods, etc.) for conjugating various moieties to oligonucleotide moieties. In some embodiments, the present disclosure provides technologies for conjugating targeting component to oligonucleotide moieties. In some embodiments, the present disclosure provides acids comprising targeting components for conjugation, e.g., R^{LD}—COOH. In some embodiments, the present disclosure provides linkers for conjugation, e.g., L^{M}. A person having ordinary skill in the art understands that many known and widely practiced technologies can be utilized for conjugation with oligonucleotide moieties in accordance with the present disclosure. In some embodiments, a provided acid is

[chemical structure]

In some embodiments, a provided acid is

[chemical structure]

In some embodiments, a provided acid is

[chemical structure]

In some embodiments, a provided acid is

[chemical structure]

In some embodiments, a provided acid is a fatty acid, which can provide a lipid moiety as a targeting component. In some embodiments, the present disclosure provides methods and reagents for preparing such acids.

[1004] In some embodiments, a targeting moiety is a lipid moiety, e.g., moiety of cholesterol or derivatives thereof (R^{TD}—H is an optionally substituted cholesterol or derivatives thereof).

[1005] In some embodiments, a targeting moiety is a peptide. In some embodiments, a targeting moiety is protein or a domain thereof. In some embodiments, a targeting moiety is antibody or a portion thereof.

[1006] Optional Additional Chemical Moieties Conjugated to an APOC3 Oligonucleotide: A Lipid Moiety

[1007] In some embodiments, provided oligonucleotides or oligonucleotide compositions further comprise one or more lipids or lipid moieties. In some embodiments, a lipid is a lipid moiety. In some embodiments, a lipid moiety is or comprises a lipid which is conjugated directly or indirectly to an APOC3 oligonucleotide. In some embodiments, lipid conjugation can achieve one or more unexpected, greatly improved properties (e.g., activities, toxicities, distribution, pharmacokinetics, etc.). As appreciated by a person having ordinary skill in the art, various carbohydrate moieties are described in the literature and can be utilized in accordance with the present disclosure.

[1008] Lipid moieties can be incorporated into oligonucleotides at various locations, for example, sugar units, internucleotidic linkage units, nucleobase units, etc., optionally through one or more bivalent or multivalent linkers (which can be used to connect two or more carbohydrate moieties to oligonucleotides). In some embodiments, the present disclosure provides technologies for lipid incorporation into oligonucleotides. In some embodiments, the present disclosure provides technologies for incorporating lipid moieties, optionally through one or more linkers, at nucleobase units, as an alternative and/or addition to incorporation at internucleotidic linkages and/or sugar units, thereby providing enormous flexibility and/or improved properties and/or activities. In some embodiments, a provided oligonucleotide comprises at least one lipid moiety, optionally through a linker, incorporated into the oligonucleotide at a nucleobase unit.

[1009] In some embodiments, provided oligonucleotides have the structure of:

A^{c}-[-L^{M}-(R^{D})ₐ]_{b}, or [(A^{c})ₐ-L^{M}]_{b}-R^{D},

wherein:

[1010] A^{c} is an APOC3 oligonucleotide chain ([H]_{b}-A^{c} is an APOC3 oligonucleotide);

[1011] a is 1-1000;

[1012] b is 1-1000;

[1013] each L^{M} is independently a linker; and

[1014] each R^{D} is independently R^{LD} or R^{CD}, P R^{CD} is an optionally substituted, linear or branched group selected from a C₁₋₁₀₀ aliphatic group and a C₁₋₁₀₀ heteroaliphatic group having 1-30 heteroatoms independently selected from oxygen, nitrogen, sulfur, phosphorus, boron and silicon, wherein one or more methylene units are optionally and independently replaced with C₁₋₆ alkylene, C₁₋₆ alkenylene, —C≡C—, —C(R′)₂—, —O—, —S—, —S—S—, —N(R′)—, —C(O)—, —C(S)—, —C(NR′)—, —C(O)N(R′)—, —N(R′)C(O)N(R′)—, —N(R′)C(O)O—, —S(O)—, —S(O)₂—, —S(O)₂N(R′)—, —C(O)S—, —C(O)O—, —P(O)(OR′)—, —P(O)(SR′)—, —P(O)(R′)—, —P(O)(NR′)—, —P(S)(OR′)—, —P(S)(SR′)—, —P(S)(R′)—, —P(S)(NR′)—, —P(R′)—, —P(OR′)—, —P(SR′)—, —P(NR′)—, —P(OR′)[B(R′)₃]—, —OP(O)(OR′)O—, —OP(O)(SR′)O—, —OP(O)(R′)O—, —OP(O)(NR′)O—, —OP(OR′)O—, —OP(SR′)O—, —OP(NR′)O—, —OP(R′)O—, or —OP(OR′)[B(R′)₃]O—; and one or more carbon atoms are optionally and independently replaced with Cy;

[1015] R^{LD} is an optionally substituted, linear or branched group selected from a C₁₋₁₀₀ aliphatic group wherein one or more methylene units are optionally and independently replaced with C₁₋₆ alkylene, C₁₋₆ alkenylene, —C≡C—, —C(R′)₂—, —O—, —S—, —S—S—, —N(R′)—, —C(O)—, —C(S)—, —C(NR′)—, —C(O)N(R′)—, —N(R′)C(O)N(R′)—, —N(R′)C(O)O—, —S(O)—, —S(O)2-, —S(O)2N(R′)—, —C(O)S—, —C(O)O—, —P(O)(OR′)—, —P(O)(SR′)—, —P(O)(R′)—, —P(O)(NR′)—, —P(S)(OR′)—, —P(S)(SR′)—, —P(S)(R′)—, —P(S)(NR′)—, —P(R′)—, —P(OR′)—, —P(SR′)—, —P(NR′)—, —P(OR′)[B(R′)₃]—, —OP(O)(OR′)O—, —OP(O)(SR′)O—, —OP(O)(R′)O—, —OP(O)(NR′)O—, —OP(OR′)O—, —OP(SR′)O—, —OP(NR′)O—, —OP(R′)O—, or —OP(OR′)[B(R′)₃]O—; and one or more carbon atoms are optionally and independently replaced with Cy;

[1016] L^{M} is a covalent bond, or a bivalent or multivalent, optionally substituted, linear or branched group selected from a C₁₋₁₀₀ aliphatic group and a C₁₋₁₀₀ heteroaliphatic group having 1-30 heteroatoms independently selected from oxygen, nitrogen, sulfur, phosphorus, boron and silicon, wherein one or more methylene units are optionally and independently replaced with C₁₋₆ alkylene, C₁₋₆ alkenylene, —C≡C—, —C(R′)₂—, —O—, —S—, —S—S—, —N(R′)—, —C(O)—, —C(S)—, —C(NR′)—, —C(O)N(R′)—, —N(R′)C(O)N(R′)—, —N(R′)C(O)O—, —S(O)—, —S(O)₂—, —S(O)₂N(R′)—, —C(O)S—, —C(O)O—, —P(O)(OR′)—, —P(O)(SR′)—, —P(O)(R′)—, —P(O)(NR′)—, —P(S)(OR′)—, —P(S)(SR′)—, —P(S)(R′)—, —P(S)(NR′)—, —P(R′)—, —P(OR′)—, —P(SR′)—, —P(NR′)—, —P(OR′)[B(R′)₃]—, —OP(O)(OR′)O—, —OP(O)(SR′)O—, —OP(O)(R′)O—, —OP(O)(NR′)O—, —OP(OR′)O—, —OP(SR′)O—, —OP(NR′)O—, —OP(R′)O—, or —OP(OR′)[B(R′)₃]O—; and one or more carbon atoms are optionally and independently replaced with Cy^{L};

[1017] Cy^{L} is an optionally substituted tetravalent group selected from a C₃₋₂₀ cycloaliphatic ring, a C₆₋₂₀ aryl ring, a 5-20 membered heteroaryl ring having 1-10 heteroatoms independently selected from oxygen, nitrogen, sulfur, phosphorus and silicon, and a 3-20 membered heterocyclyl ring having 1-10 heteroatoms independently selected from oxygen, nitrogen, sulfur, phosphorus, boron and silicon;

[1018] each R′ is independently —R, —C(O)R, —C(O)OR, or —S(O)₂R; and

[1019] each R is independently —H, or an optionally substituted group selected from C₁₋₃₀ aliphatic, C₁₋₃₀ heteroaliphatic having 1-10 heteroatoms independently selected from oxygen, nitrogen, sulfur, phosphorus and silicon, C₆₋₃₀ aryl, C₆₋₃₀ arylaliphatic, C₆₋₃₀ arylheteroaliphatic having 1-10 heteroatoms independently selected from oxygen, nitrogen, sulfur, phosphorus and silicon, 5-30 membered heteroaryl having 1-10 heteroatoms independently selected from oxygen, nitrogen, sulfur, phosphorus and silicon, and 3-30 membered heterocyclyl having 1-10 heteroatoms independently selected from oxygen, nitrogen, sulfur, phosphorus and silicon, or

[1020] two R groups are optionally and independently taken together to form a covalent bond, or:

[1021] two or more R groups on the same atom are optionally and independently taken together with the atom to form an optionally substituted, 3-30 membered monocyclic, bicyclic or polycyclic ring having, in addition to the atom, 0-10 heteroatoms independently selected from oxygen, nitrogen, sulfur, phosphorus and silicon; or

[1022] two or more R groups on two or more atoms are optionally and independently taken together with their intervening atoms to form an optionally substituted, 3-30 membered monocyclic, bicyclic or polycyclic ring having, in addition to the intervening atoms, 0-10 heteroatoms independently selected from oxygen, nitrogen, sulfur, phosphorus and silicon.

[1023] In some embodiments, R^{CD} is a carbohydrate moiety or a bicyclic ketal. In some embodiments, R^{CD} comprises at least one monosaccharide, disaccharide, or polysaccharide units. In some embodiments, R^{CD} comprises at least one GalNAc moiety or a derivative thereof.

[1024] In some embodiments, R^{LD} is a lipid moiety. In some embodiments, R^{LD} comprises one or more optionally substituted C₆₋₂₀ aliphatic chain. In some embodiments, R^{LD} comprises one or more unsubstituted C₆₋₂₀ aliphatic chain.

[1025] In some embodiments, at least one L^{M} is directly bound to a sugar unit of a provided oligonucleotide. In some embodiments, a L^{M} directly binds to a sugar unit incorporates a lipid moiety into an APOC3 oligonucleotide. In some embodiments, a L^{M} directly binds to a sugar unit incorporates a carbohydrate moiety into an APOC3 oligonucleotide. In some embodiments, a L^{M} directly binds to a sugar unit incorporates a R^{LD} group into an APOC3 oligonucleotide. In some embodiments, a L^{M} directly binds to a sugar unit incorporates a R^{CD} group into an APOC3 oligonucleotide.

[1026] In some embodiments, at least one L^{M} is directly bound to an internucleotidic linkage unit of a provided oligonucleotide. In some embodiments, a L^{M} directly binds to an internucleotidic linkage unit incorporates a lipid moiety into an APOC3 oligonucleotide. In some embodiments, a L^{M} directly binds to an internucleotidic linkage unit incorporates a carbohydrate moiety into an APOC3 oligonucleotide. In some embodiments, a L^{M} directly binds to an internucleotidic linkage unit incorporates a R^{LD} group into an APOC3 oligonucleotide. In some embodiments, a L^{M} directly binds to an internucleotidic linkage unit incorporates a R^{CD} group into an APOC3 oligonucleotide.

[1027] In some embodiments, at least one L^{M} is directly bound to a nucleobase unit of a provided oligonucleotide. In some embodiments, a L^{M} directly binds to a nucleobase unit incorporates a lipid moiety into an APOC3 oligonucleotide. In some embodiments, a L^{M} directly binds to a nucleobase unit incorporates a carbohydrate moiety into an APOC3 oligonucleotide. In some embodiments, a L^{M} directly binds to a nucleobase unit incorporates a R^{LD} group into an APOC3 oligonucleotide. In some embodiments, a L^{M} directly binds to a nucleobase unit incorporates a R^{CD} group into an APOC3 oligonucleotide.

[1028] In some embodiments, [H]_{b}-A^{c} is an APOC3 oligonucleotide described in the present disclosure.

[1029] In some embodiments, incorporation of a lipid into a provided oligonucleotide improves distribution and/or pharmacokinetics. In some embodiments, incorporation of a lipid into a provided oligonucleotide improves one or more measurement of pharmacokinetics selected from: Cₘₐₓ, peak plasma concentration of a drug after administration; tₘₐₓ, time to reach Cₘₐₓ; Cₘᵢₙ, lowest (trough) concentration that a drug reaches before the next dose is administered; elimination half-life, the time required for the concentration of the drug to reach half of its original value; elimination rate constant, rate at which a drug is removed from the body; area under the curve, integral of the concentration-time curve (after a single dose or in steady state); and clearance, volume of plasma cleared of the drug per unit time. Without being bound to any particular theory, this disclosure notes that optimization of a pharmacokinetic characteristic such as half-life can be distinguished from maximization. In some embodiments, in general, it may be desirable for a particular drug to have a half-life sufficient to allow performance of its desired function, but short enough to minimize off-target effects and other toxicity. In some embodiments, an optimized half-life is long enough to allow activity while minimizing toxicity; a prolonged or maximized half-life may be undesirable.

[1030] In some embodiments, provided oligonucleotide compositions further comprise one or more lipids. In some embodiments, provided oligonucleotide compositions further comprise one or more fatty acids. In some embodiments, the lipids can be incorporated into provided oligonucleotides in the compositions. In some embodiments, two or more same or different lipids can be incorporated into one oligonucleotide, through either the same or differently chemistry and/or locations.

[1031] Many lipids can be utilized in provided technologies in accordance with the present disclosure. In some embodiments, a lipid comprises an R^{LD} group. In some embodiments, R^{LD} is an optionally substituted, C₁₀-C₈₀ saturated or partially unsaturated aliphatic group, wherein one or more methylene units are optionally and independently replaced by an optionally substituted group selected from C₁-C₆ alkylene, C₁-C₆ alkenylene, —C≡C—, a C₁-C₆ heteroaliphatic moiety, —C(R′)₂—, and —Cy-. In some embodiments, R^{LD} is an optionally substituted, C₁₀-C₆₀ saturated or partially unsaturated aliphatic group, wherein one or more methylene units are optionally and independently replaced by an optionally substituted group selected from C₁-C₆ alkylene, C₁-C₆ alkenylene, —C≡C—, a C₁-C₆ heteroaliphatic moiety, —C(R′)₂—, and —Cy-. In some embodiments, R^{LD} is a hydrocarbon group consisting of carbon and hydrogen atoms. In some embodiments, —Cy— is an optionally substituted bivalent group selected from a C₃₋₂₀ cycloaliphatic ring, a C₆₋₂₀ aryl ring, a 5-20 membered heteroaryl ring having 1-10 heteroatoms independently selected from oxygen, nitrogen, sulfur, phosphorus and silicon, and a 3-20 membered heterocyclyl ring having 1-10 heteroatoms independently selected from oxygen, nitrogen, sulfur, phosphorus, boron and silicon.

[1032] In some embodiments, R^{LD} is an optionally substituted, C₁₀-C₆₀ saturated or partially unsaturated aliphatic group, wherein one or more methylene units are optionally and independently replaced by an optionally substituted group selected from C₁-C₆ alkylene, C₁-C₆ alkenylene, —C≡C—, a C₁-C₆ heteroaliphatic moiety, —C(R′)₂—, and —Cy-. In some embodiments, R^{LD} is an optionally substituted, C₁₀-C₆₀ saturated or partially unsaturated aliphatic group, wherein one or more methylene units are optionally and independently replaced by an optionally substituted group selected from C₁-C₆ alkylene, C₁-C₆ alkenylene, —C≡C—, a C₁-C₆ heteroaliphatic moiety, —C(R′)₂—, and —Cy-. In some embodiments, R^{LD} is a hydrocarbon group consisting carbon and hydrogen atoms.

[1033] In some embodiments, R^{LD} is an optionally substituted, C₁₀-C₄₀ saturated or partially unsaturated aliphatic group, wherein one or more methylene units are optionally and independently replaced by an optionally substituted group selected from C₁-C₆ alkylene, C₁-C₆ alkenylene, —C≡C—, a C₁-C₆ heteroaliphatic moiety, —C(R′)₂—, and —Cy-. In some embodiments, R^{LD} is an optionally substituted, C₁₀-C₆₀ saturated or partially unsaturated aliphatic group, wherein one or more methylene units are optionally and independently replaced by an optionally substituted group selected from C₁-C₆ alkylene, C₁-C₆ alkenylene, —C≡C—, a C₁-C₆ heteroaliphatic moiety, —C(R′)₂—, and —Cy-. In some embodiments, R^{LD} is a hydrocarbon group consisting carbon and hydrogen atoms.

[1034] The aliphatic group of R^{LD} can be a variety of suitable length. In some embodiments, it is C₁₀-C₈₀. In some embodiments, it is C₁₀-C₇₅. In some embodiments, it is C₁₀-C₇₀. In some embodiments, it is C₁₀-C₆₅. In some embodiments, it is C₁₀-C₆₀. In some embodiments, it is C₁₀-C₅₀. In some embodiments, it is C₁₀-C₄₀. In some embodiments, it is C₁₀-C₃₅. In some embodiments, it is C₁₀-C₃₀. In some embodiments, it is C₁₀-C₂₅. In some embodiments, it is C₁₀-C₂₄. In some embodiments, it is C₁₀-C₂₃. In some embodiments, it is C₁₀-C₂₂. In some embodiments, it is C₁₀-C₂₁. In some embodiments, it is C₁₂-C₂₂. In some embodiments, it is C₁₃-C₂₂. In some embodiments, it is C₁₄-C₂₂. In some embodiments, it is C₁₅-C₂₂. In some embodiments, it is C₁₆-C₂₂. In some embodiments, it is C₁₇-C₂₂. In some embodiments, it is C₁₈-C₂₂. In some embodiments, it is C₁₀-C₂₀. In some embodiments, the lower end of the range is C₁₀, C₁₁, C₁₂, C₁₃, C₁₄, C₁₅, C₁₆, C₁₇, or C₁₈. In some embodiments, the higher end of the range is C₁₈, C₁₉, C₂₀, C₂₁, C₂₂, C₂₃, C₂₄, C₂₅, C₂₆, C₂₇, C₂₈, C₂₉, C₃₀, C₃₅, C₄₀, C₄₅, C₅₀, C₅₅, or C₆₀. In some embodiments, it is C₁₀. In some embodiments, it is C₁₁. In some embodiments, it is C₁₂. In some embodiments, it is C₁₃. In some embodiments, it is C₁₄. In some embodiments, it is C₁₅. In some embodiments, it is C₁₆. In some embodiments, it is C₁₇. In some embodiments, it is C₁₈. In some embodiments, it is C₁₉. In some embodiments, it is C₂₀. In some embodiments, it is C₂₁. In some embodiments, it is C₂₂. In some embodiments, it is C₂₃. In some embodiments, it is C₂₄. In some embodiments, it is C₂₅. In some embodiments, it is C₃₀. In some embodiments, it is C₃₅. In some embodiments, it is C₄₀. In some embodiments, it is C₄₅. In some embodiments, it is C₅₀. In some embodiments, it is C₅₅. In some embodiments, it is C₆₀.

[1035] In some embodiments, a lipid comprises no more than one R^{LD} group. In some embodiments, a lipid comprises two or more R^{LD} groups.

[1036] In some embodiments, a lipid is conjugated to a biologically active agent, optionally through a linker, as a moiety comprising an R^{LD} group. In some embodiments, a lipid is conjugated to a biologically active agent, optionally through a linker, as a moiety comprising no more than one R^{LD} group. In some embodiments, a lipid is conjugated to a biologically active agent, optionally through a linker, as an R^{LD} group. In some embodiments, a lipid is conjugated to a biologically active agent, optionally through a linker, as a moiety comprising two or more R^{LD} groups.

[1037] In some embodiments, R^{LD} is an optionally substituted, C₁₀-C₄₀ saturated or partially unsaturated, aliphatic chain. In some embodiments, a lipid comprises an optionally substituted C₁₀-C₄₀ saturated or partially unsaturated, aliphatic chain.

[1038] In some embodiments, R^{LD} is an optionally substituted C₁₀-C₄₀ linear, saturated or partially unsaturated, aliphatic chain. In some embodiments, a lipid comprises an optionally substituted C₁₀-C₄₀ linear, saturated or partially unsaturated, aliphatic chain.

[1039] In some embodiments, R^{LD} is a C₁₀-C₄₀ linear, saturated or partially unsaturated, aliphatic chain, optionally substituted with one or more C₁₋₄ aliphatic groups. In some embodiments, a lipid comprises a C₁₀-C₄₀ linear, saturated or partially unsaturated, aliphatic chain, optionally substituted with one or more C₁₋₄ aliphatic groups. In some embodiments, R^{LD} is a C₁₀-C₄₀ linear, saturated or partially unsaturated, aliphatic chain, optionally substituted with one or more C₁₋₂ aliphatic groups. In some embodiments, a lipid comprises a C₁₀-C₄₀ linear, saturated or partially unsaturated, aliphatic chain, optionally substituted with one or more C₁₋₂ aliphatic groups. In some embodiments, R^{LD} is a C₁₀-C₄₀ linear, saturated or partially unsaturated, aliphatic chain, optionally substituted with one or more methyl groups. In some embodiments, a lipid comprises a C₁₀-C₄₀ linear, saturated or partially unsaturated, aliphatic chain, optionally substituted with one or more methyl groups.

[1040] In some embodiments, R^{LD} is an unsubstituted C₁₀-C₄₀ linear, saturated or partially unsaturated, aliphatic chain. In some embodiments, a lipid comprises an unsubstituted C₁₀-C₄₀ linear, saturated or partially unsaturated, aliphatic chain.

[1041] In some embodiments, a lipid comprises no more than one optionally substituted C₁₀-C₄₀ linear, saturated or partially unsaturated, aliphatic chain. In some embodiments, a lipid comprises two or more optionally substituted C₁₀-C₄₀ linear, saturated or partially unsaturated, aliphatic chain.

[1042] In some embodiments, R^{LD} is an optionally substituted, C₁₀-C₆₀ saturated or partially unsaturated, aliphatic chain. In some embodiments, a lipid comprises an optionally substituted C₁₀-C₆₀ saturated or partially unsaturated, aliphatic chain.

[1043] In some embodiments, R^{LD} is an optionally substituted C₁₀-C₆₀ linear, saturated or partially unsaturated, aliphatic chain. In some embodiments, a lipid comprises an optionally substituted C₁₀-C₆₀ linear, saturated or partially unsaturated, aliphatic chain.

[1044] In some embodiments, R^{LD} is a C₁₀-C₆₀ linear, saturated or partially unsaturated, aliphatic chain, optionally substituted with one or more C₁₋₄ aliphatic groups. In some embodiments, a lipid comprises a C₁₀-C₆₀ linear, saturated or partially unsaturated, aliphatic chain, optionally substituted with one or more C₁₋₄ aliphatic groups. In some embodiments, R^{LD} is a C₁₀-C₆₀ linear, saturated or partially unsaturated, aliphatic chain, optionally substituted with one or more C₁₋₂ aliphatic groups. In some embodiments, a lipid comprises a C₁₀-C₆₀ linear, saturated or partially unsaturated, aliphatic chain, optionally substituted with one or more C₁₋₂ aliphatic groups. In some embodiments, R^{LD} is a C₁₀-C₆₀ linear, saturated or partially unsaturated, aliphatic chain, optionally substituted with one or more methyl groups. In some embodiments, a lipid comprises a C₁₀-C₆₀ linear, saturated or partially unsaturated, aliphatic chain, optionally substituted with one or more methyl groups.

[1045] In some embodiments, R^{LD} is an unsubstituted C₁₀-C₆₀ linear, saturated or partially unsaturated, aliphatic chain. In some embodiments, a lipid comprises an unsubstituted C₁₀-C₆₀ linear, saturated or partially unsaturated, aliphatic chain.

[1046] In some embodiments, a lipid comprises no more than one optionally substituted C₁₀-C₆₀ linear, saturated or partially unsaturated, aliphatic chain. In some embodiments, a lipid comprises two or more optionally substituted C₁₀-C₆₀ linear, saturated or partially unsaturated, aliphatic chain.

[1047] In some embodiments, R^{LD} is an optionally substituted, C₁₀-C₈₀ saturated or partially unsaturated, aliphatic chain. In some embodiments, a lipid comprises an optionally substituted C₁₀-C₈₀ saturated or partially unsaturated, aliphatic chain.

[1048] In some embodiments, R^{LD} is an optionally substituted C₁₀-C₈₀ linear, saturated or partially unsaturated, aliphatic chain. In some embodiments, a lipid comprises an optionally substituted C₁₀-C₈₀ linear, saturated or partially unsaturated, aliphatic chain.

[1049] In some embodiments, R^{LD} is a C₁₀-C₈₀ linear, saturated or partially unsaturated, aliphatic chain, optionally substituted with one or more C₁₋₄ aliphatic groups. In some embodiments, a lipid comprises a C₁₀-C₈₀ linear, saturated or partially unsaturated, aliphatic chain, optionally substituted with one or more C₁₋₄ aliphatic groups. In some embodiments, R^{LD} is a C₁₀-C₈₀ linear, saturated or partially unsaturated, aliphatic chain, optionally substituted with one or more C₁₋₂ aliphatic groups. In some embodiments, a lipid comprises a C₁₀-C₈₀ linear, saturated or partially unsaturated, aliphatic chain, optionally substituted with one or more C₁₋₂ aliphatic groups. In some embodiments, R^{LD} is a C₁₀-C₈₀ linear, saturated or partially unsaturated, aliphatic chain, optionally substituted with one or more methyl groups. In some embodiments, a lipid comprises a C₁₀-C₈₀ linear, saturated or partially unsaturated, aliphatic chain, optionally substituted with one or more methyl groups.

[1050] In some embodiments, R^{LD} is an unsubstituted C₁₀-C₈₀ linear, saturated or partially unsaturated, aliphatic chain. In some embodiments, a lipid comprises an unsubstituted C₁₀-C₈₀ linear, saturated or partially unsaturated, aliphatic chain.

[1051] In some embodiments, a lipid comprises no more than one optionally substituted C₁₀-C₈₀ linear, saturated or partially unsaturated, aliphatic chain. In some embodiments, a lipid comprises two or more optionally substituted C₁₀-C₈₀ linear, saturated or partially unsaturated, aliphatic chain.

[1052] In some embodiments, R^{LD} is or comprises a C₁₀ saturated linear aliphatic chain. In some embodiments, R^{LD} is or comprises a C₁₀ partially unsaturated linear aliphatic chain. In some embodiments, R^{LD} is or comprises a C₁₁ saturated linear aliphatic chain. In some embodiments, R^{LD} is or comprises a C₁₁ partially unsaturated linear aliphatic chain. In some embodiments, R^{LD} is or comprises a Cu saturated linear aliphatic chain. In some embodiments, R^{LD} is or comprises a C₁₂ partially unsaturated linear aliphatic chain. In some embodiments, R^{LD} is or comprises a C₁₃ saturated linear aliphatic chain. In some embodiments, R^{LD} is or comprises a C₁₃ partially unsaturated linear aliphatic chain. In some embodiments, R^{LD} is or comprises a C₁₋₄ saturated linear aliphatic chain. In some embodiments, R^{LD} is or comprises a C₁₋₄ partially unsaturated linear aliphatic chain. In some embodiments, R^{LD} is or comprises a C₁₅ saturated linear aliphatic chain. In some embodiments, R^{LD} is or comprises a C₁₅ partially unsaturated linear aliphatic chain. In some embodiments, R^{LD} is or comprises a C₁₆ saturated linear aliphatic chain. In some embodiments, R^{LD} is or comprises a C₁₆ partially unsaturated linear aliphatic chain. In some embodiments, R^{LD} is or comprises a C₁₇ saturated linear aliphatic chain. In some embodiments, R^{LD} is or comprises a C₁₇ partially unsaturated linear aliphatic chain. In some embodiments, R^{LD} is or comprises a C₁₈ saturated linear aliphatic chain. In some embodiments, R^{LD} is or comprises a C₁₈ partially unsaturated linear aliphatic chain. In some embodiments, R^{LD} is or comprises a C₁₉ saturated linear aliphatic chain. In some embodiments, R^{LD} is or comprises a C₁₉ partially unsaturated linear aliphatic chain. In some embodiments, R^{LD} is or comprises a C₂₀ saturated linear aliphatic chain. In some embodiments, R^{LD} is or comprises a C₂₀ partially unsaturated linear aliphatic chain. In some embodiments, R^{LD} is or comprises a C₂₁ saturated linear aliphatic chain. In some embodiments, R^{LD} is or comprises a C₂₁ partially unsaturated linear aliphatic chain. In some embodiments, R^{LD} is or comprises a C₂₂ saturated linear aliphatic chain. In some embodiments, R^{LD} is or comprises a C₂₂ partially unsaturated linear aliphatic chain. In some embodiments, R^{LD} is or comprises a C₂₃ saturated linear aliphatic chain. In some embodiments, R^{LD} is or comprises a C₂₃ partially unsaturated linear aliphatic chain. In some embodiments, R^{LD} is or comprises a C₂₄ saturated linear aliphatic chain. In some embodiments, R^{LD} is or comprises a C₂₄ partially unsaturated linear aliphatic chain. In some embodiments, R^{LD} is or comprises a C₂₅ saturated linear aliphatic chain. In some embodiments, R^{LD} is or comprises a C₂₅ partially unsaturated linear aliphatic chain. In some embodiments, R^{LD} is or comprises a C₂₆ saturated linear aliphatic chain. In some embodiments, R^{LD} is or comprises a C₂₆ partially unsaturated linear aliphatic chain. In some embodiments, R^{LD} is or comprises a C₂₇ saturated linear aliphatic chain. In some embodiments, R^{LD} is or comprises a C₂₇ partially unsaturated linear aliphatic chain. In some embodiments, R^{LD} is or comprises a C₂₈ saturated linear aliphatic chain. In some embodiments, R^{LD} is or comprises a C₂₈ partially unsaturated linear aliphatic chain. In some embodiments, R^{LD} is or comprises a C₂₉ saturated linear aliphatic chain. In some embodiments, R^{LD} is or comprises a C₂₉ partially unsaturated linear aliphatic chain. In some embodiments, R^{LD} is or comprises a C₃₀ saturated linear aliphatic chain. In some embodiments, R^{LD} is or comprises a C₃₀ partially unsaturated linear aliphatic chain.

[1053] In some embodiments, R^{LD} is derived from cholesterol or a derivatives thereof, e.g., R^{LD}—H is optionally substituted cholesterol or a derivative thereof.

[1054] In some embodiments, a lipid has the structure of R^{LD}—OH. In some embodiments, a lipid has the structure of R^{LD}—C(O)OH. In some embodiments, R^{LD} is

[chemical structure]

In some embodiments, a lipid is lauric acid, myristic acid, palmitic acid, stearic acid, oleic acid, linoleic acid, alpha-linolenic acid, gamma-linolenic acid, docosahexaenoic acid (DHA or cis-DHA), turbinaric acid, arachidonic acid, and dilinoleyl. In some embodiments, a lipid is lauric acid, myristic acid, palmitic acid, stearic acid, oleic acid, linoleic acid, alpha-linolenic acid, gamma-linolenic acid, docosahexaenoic acid (DHA or cis-DHA), turbinaric acid and dilinoleyl. In some embodiments, a lipid has a structure of:

[chemical structure]

[1055] In some embodiments, a lipid is, comprises or consists of any of: an at least partially hydrophobic or amphiphilic molecule, a phospholipid, a triglyceride, a diglyceride, a monoglyceride, a fat-soluble vitamin, a sterol, a fat and a wax. In some embodiments, a lipid is any of: a fatty acid, glycerolipid, glycerophospholipid, sphingolipid, sterol lipid, prenol lipid, saccharolipid, polyketide, and other molecule.

[1056] Lipids can be incorporated into provided technologies through many types of methods in accordance with the present disclosure. In some embodiments, lipids are physically mixed with provided oligonucleotides to form provided compositions. In some embodiments, lipids are chemically conjugated with oligonucleotide moieties.

[1057] In some embodiments, provided compositions comprise two or more lipids. In some embodiments, provided oligonucleotides comprise two or more conjugated lipids. In some embodiments, the two or more conjugated lipids are the same. In some embodiments, the two or more conjugated lipids are different. In some embodiments, provided oligonucleotides comprise no more than one lipid. In some embodiments, oligonucleotides of a provided composition comprise different types of conjugated lipids. In some embodiments, oligonucleotides of a provided composition comprise the same type of lipids.

[1058] Lipids can be conjugated to oligonucleotides optionally through linkers. Various types of linkers in the art can be utilized in accordance of the present disclosure. In some embodiments, a linker is L^{M} as described in the present disclosure. In some embodiments, a linker comprise a phosphate group, which can, for example, be used for conjugating lipids through chemistry similar to those employed in oligonucleotide synthesis. In some embodiments, a linker comprises an amide, ester, or ether group.

[1059] In some embodiments, a linker has the structure of -L^{M}-. In some embodiments, L^{M} is L^{D}. In some embodiments, L^{D} is T^{D} having the structure of

[chemical structure]

wherein each variable is independently as defined and described. In some embodiments, T^{D} has the structure of formula I. In some embodiments, T^{D} with the 5′-O— of an APOC3 oligonucleotide moiety form a phosphorothioate linkage (—OP(O)(S⁻)O—). In some embodiments, T^{D} with the 5′-O— of an APOC3 oligonucleotide moiety form an Sp phosphorothioate linkage. In some embodiments, T^{D} with the 5′-O— of an APOC3 oligonucleotide moiety form an Rp phosphorothioate linkage. In some embodiments, T^{D} with the 5′-O— of an APOC3 oligonucleotide moiety form a phosphate linkage (—OP(O)(O⁻)O—). In some embodiments, T^{D} with the 5′-O— of an APOC3 oligonucleotide moiety form a phosphorodithioate linkage. In some embodiments, L^{D} is -L-T^{D}-. In some embodiments, Y connects to -L- and —Z— is a covalent bond, so that P directly connects to a hydroxyl group of the oligonucleotide moiety. In some embodiments, P connects to the 5′-end hydroxyl (5′-O—) to form a phosphate group (natural phosphate linkage) or phosphorothioate group (phosphorothioate linkage). In some embodiments, the phosphorothioate linkage is chirally controlled and can be either Rp or Sp. Unless otherwise specified, chiral centers in the linkers (e.g., P in T^{D}) can be either stereorandom or chirally controlled, and they are not considered as part of the backbone chiral centers, e.g., for determining whether a composition is chirally controlled. In some embodiments, L^{D} is —NH—(CH₂)₆-T^{D}-. In some embodiments, L^{D} is —C(O)—NH—(CH₂)₆-T^{D}-.

[1060] In some embodiments, a linker has the structure of -L-. In some embodiments, after conjugation to oligonucleotides, a lipid forms a moiety having the structure of -L-R^{LD}, wherein each of L and R^{LD} is independently as defined and described herein.

[1061] In some embodiments, -L- comprises a bivalent aliphatic chain. In some embodiments, -L- comprises a phosphate group. In some embodiments, -L- comprises a phosphorothioate group. In some embodiments, -L- has the structure of —C(O)NH—(CH₂)₆—OP(═O)(S⁻)—. In some embodiments, -L- has the structure of —C(O)NH—(CH₂)₆—OP(═O)(O⁻)—.

[1062] Lipids, optionally through linkers, can be incorporated into oligonucleotides at various suitable locations. In some embodiments, lipids are conjugated through the 5′—OH group. In some embodiments, lipids are conjugated through the 3′—OH group. In some embodiments, lipids are conjugated through one or more sugar moieties. In some embodiments, lipids are conjugated through one or more bases. In some embodiments, lipids are incorporated through one or more internucleotidic linkages. In some embodiments, an APOC3 oligonucleotide may contain multiple conjugated lipids which are independently conjugated through its 5′-OH, 3′-OH, sugar moieties, base moieties and/or internucleotidic linkages.

[1063] In some embodiments, a linker is a moiety that connects two parts of a composition; as a non-limiting example, a linker physically connects an APOC3 oligonucleotide moiety to a lipid. Non-limiting examples of suitable linkers include: an uncharged linker; a charged linker; a linker comprising an alkyl; a linker comprising a phosphate; a branched linker; an unbranched linker; a linker comprising at least one cleavage group; a linker comprising at least one redox cleavage group; a linker comprising at least one phosphate-based cleavage group; a linker comprising at least one acid-cleavage group; a linker comprising at least one ester-based cleavage group; a linker comprising at least one peptide-based cleavage group.

[1064] In some embodiments, a lipid is conjugated to an active compound optionally through a linker moiety. A person having ordinary skill in the art appreciates that various technologies can be utilized to conjugate lipids to active compound in accordance with the present disclosure. For example, for lipids comprising carboxyl groups, such lipids can be conjugated through the carboxyl groups. In some embodiments, a lipid is conjugated through a linker having the structure of -L-, wherein L is as defined and described in formula I. In some embodiments, L comprises a phosphate diester or modified phosphate diester moiety. In some embodiments, a compound formed by lipid conjugation has the structure of (R^{LD}-L-)ₐ-(active compound), wherein a is 1 or an integer greater than 1, and each of R^{LD} and L is independently as defined and described herein. In some embodiments, a is 1. In some embodiments, a is greater than 1. In some embodiments, a is 1-50. In some embodiments, an active compound is an APOC3 oligonucleotide. For example, in some embodiments, a conjugate has any of the following structures:

[chemical structure]

wherein Oligo indicates an oligonucleotide.

[1065] In some embodiments, a linker is selected from: an uncharged linker; a charged linker; a linker comprising an alkyl; a linker comprising a phosphate; a branched linker; an unbranched linker; a linker comprising at least one cleavage group; a linker comprising at least one redox cleavage group; a linker comprising at least one phosphate-based cleavage group; a linker comprising at least one acid-cleavage group; a linker comprising at least one ester-based cleavage group; and a linker comprising at least one peptide-based cleavage group. In some embodiments, a linker, e.g., L^{M}, has the structure of -L^{LD}-. In some embodiments, a linker, e.g., L^{M}, has the structure of -L-. In some embodiments, a linker comprises a linkage of formula I. In some embodiments, a linker is —C(O)NH—(CH₂)₆-L^{I}-, wherein L^{I} has the structure of formula I as described herein. In some embodiments, a linker is —C(O)NH—(CH₂)₆—O—P(═O)(SR¹)—O—. In some embodiments, R¹ is —H, and a linker is —C(O)NH—(CH₂)₆—O—P(═O)(SH)—O—, in some conditions, e.g., certain pH, —C(O)NH—(CH₂)₆—O—P(═O)(S⁻)—O—. In some embodiments, a linker is —C(O)NH—(CH₂)₆—O—P(═S)(SR¹)—O—. In some embodiments, R¹ is —H, and a linker is —C(O)NH—(CH₂)₆—O—P(═S)(SH)—O—, in some conditions, e.g., certain pH, —C(O)NH—(CH₂)₆—O—P(═S)(S⁻)—O—. In some embodiments, a linker is —C(O)NH—(CH₂)₆—O—P(═S)(OR¹)—O—, wherein R¹ is —CH₂CH₂CN. In some embodiments, a linker is —C(O)NH—(CH₂)₆—O—P(═S)(SR¹)—O—, wherein R¹ is —CH₂CH₂CN. In some embodiments, a provided oligonucleotide is coupled with a linker and forms a structure of H-linker-oligonucleotide. In some embodiments, a provided oligonucleotide is conjugated to a lipid and forms the structure of lipid-linker-oligonucleotide, e.g., R^{LD}-L^{LD}-oligonucleotide. In some embodiments, the —O— end of a linker is connected to an APOC3 oligonucleotide. In some embodiments, the —O— end of a linker is connected to the 5′-end oligonucleotide (—O— being the oxygen in the 5′-OH).

[1066] In some embodiments, a linker, e.g., L^{M}, comprises a PO (phosphodiester linkage), a PS (phosphorothioate linkage) or PS2 (phosphorodithioate linkage). A non-limiting example including a PS linker is shown below. In some embodiments, a linker is —O—P(O)(OH)—O— [phosphodiester], —O—P(O)(SH)—O— [phosphorothioate] or —O—P(S)(SH)—O— [phosphorodithioate]. In some embodiments, a linker comprises a C₆ amino moiety (—NH—(CH₂)₆—), which is illustrated below. In some embodiments, a linker comprises a C₆ amino bound to a PO, a PS, or PS2. In some embodiments, a linker is a C₆ amino bound to a PO, a PS, or PS2. In some embodiments, a linker, e.g., L^{LD} or L, is —C(O)—NH—(CH₂)₆—P(O)(OH)—. In some embodiments, a linker, e.g., L^{LD} or L, is —C(O)—NH—(CH₂)₆—P(O)(OH)—, wherein —C(O)— is connected to a lipid moiety and —P(O)(OH)— is connected to an APOC3 oligonucleotide moiety. In some embodiments, a linker, e.g., L^{LD} or L, is —C(O)—NH—(CH₂)₆—P(O)(OH)—, wherein —C(O)— is connected to a lipid moiety and —P(O)(OH)— is connected to the 5′-O— of an APOC3 oligonucleotide moiety. In some embodiments, a linker, e.g., L^{LD} or L, is —C(O)—NH—(CH₂)₆—P(O)(OH)—, wherein —C(O)— is connected to a lipid moiety and —P(O)(OH)— is connected to the 3′-O— of an APOC3 oligonucleotide moiety. In some embodiments, a linker, e.g., L^{LD} or L, is —C(O)—NH—(CH₂)₆—P(O)(SH)—. In some embodiments, a linker, e.g., L^{LD} or L, is —C(O)—NH—(CH₂)₆—P(O)(SH)—, wherein —C(O)— is connected to a lipid moiety and —P(O)(SH)— is connected to an APOC3 oligonucleotide moiety. In some embodiments, a linker, e.g., L^{LD} or L, is —C(O)—NH—(CH₂)₆—P(O)(SH)—, wherein —C(O)— is connected to a lipid moiety and —P(O)(SH)— is connected to the 5′-O— of an APOC3 oligonucleotide moiety. In some embodiments, a linker, e.g., L^{LD} or L, is —C(O)—NH—(CH₂)₆—P(O)(SH)—, wherein —C(O)— is connected to a lipid moiety and —P(O)(SH)— is connected to the 3′-O— of an APOC3 oligonucleotide moiety. In some embodiments, a linker, e.g., L^{LD} or L, is —C(O)—NH—(CH₂)₆—P(S)(SH)—. In some embodiments, a linker, e.g., L^{LD} or L, is —C(O)—NH—(CH₂)₆—P(S)(SH)—, wherein —C(O)— is connected to a lipid moiety and —P(S)(SH)— is connected to an APOC3 oligonucleotide moiety. In some embodiments, a linker, e.g., L^{LD} or L, is —C(O)—NH—(CH₂)₆—P(S)(SH)—, wherein —C(O)— is connected to a lipid moiety and —P(S)(SH)— is connected to the 5′-O— of an APOC3 oligonucleotide moiety. In some embodiments, a linker, e.g., L^{LD} or L, is —C(O)—NH—(CH₂)₆—P(S)(SH)—, wherein —C(O)— is connected to a lipid moiety and —P(S)(SH)— is connected to the 3′-O— of an APOC3 oligonucleotide moiety. As appreciated by a person having ordinary skill in the art, at certain pH —P(O)(OH)—, —P(O)(SH)—, —P(S)(SH)— may exist as —P(O)(O⁻)—, —P(O)(S⁻)—, —P(S)(S⁻)—, respectively. In some embodiments, a lipid moiety is R^{LD}.

[chemical structure]

[1067] Various chemistry and linkers can be used for conjugation in accordance with the present disclosure. For example, in some embodiment, a lipid is incorporated using chemistry described below, or similar processes:

[chemical structure]

[1068] In some embodiments, a lipid is incorporated into an APOC3 oligonucleotide directly through a nucleobase, for example:

[chemical structure]

In some embodiments, a provided oligonucleotide comprises -L^{M}-R^{LD} directly bonded to a nucleobase. In some embodiments, a provided oligonucleotide comprises

[chemical structure]

In some embodiments, a linker (L^{M}) is

[chemical structure]

In some embodiments, a linker (L^{M}) is

[chemical structure]

In some embodiments, a lipid moiety, R^{LD}, is

[chemical structure]

In some embodiments, a provided oligonucleotide comprises

[chemical structure]

[1069] In some embodiments, a provided oligonucleotide comprises a carbohydrate moiety connected to the oligonucleotide moiety, option through a linker, at a nucleobase. In some embodiments, the nucleobase is T. In some embodiments, the nucleobase is protected T. In some embodiments, the nucleobase is optionally substituted T. In some embodiments, the connection is at the 5-carbon of a T or an optionally substituted T. In some embodiments, a provided oligonucleotide comprises one or more -L^{M}-(R^{LD})a wherein each variable is independently as described in the present disclosure. In some embodiments, a provided oligonucleotide comprises one or more -L^{M}-(R^{LD})a, which is bonded to a nucleobase, wherein each variable is independently as described in the present disclosure. In some embodiments, a provided oligonucleotide comprises one or more

[chemical structure]

wherein each variable is independently as described in the present disclosure. In some embodiments, a provided oligonucleotide comprises one or more

[chemical structure]

wherein each variable is independently as described in the present disclosure. In some embodiments, a provided oligonucleotide comprises one or more

[chemical structure]

wherein each variable is independently as described in the present disclosure. In some embodiments, a provided oligonucleotide comprises one or more

[chemical structure]

wherein each variable is independently as described in the present disclosure.
In some embodiments, a provided oligonucleotide comprises one or more

[chemical structure]

wherein each variable is independently as described in the present disclosure. In some embodiments, a provided oligonucleotide comprises one or more

[chemical structure]

wherein each variable is independently as described in the present disclosure. In some embodiments, a provided oligonucleotide comprises one or more

[chemical structure]

wherein X is O or S, R¹ is H, and each other variable is independently as described in the present disclosure. In some embodiments, R^{2s} and R^{4s} are hydrogen. In some embodiments, a provided oligonucleotide comprises one or more

[chemical structure]

wherein X is O or S, R¹ is H, and each other variable is independently as described in the present disclosure.

[1070] In some embodiments, a is 1. In some embodiments, a provided oligonucleotide comprises one or more -L^{M}-R^{CD}, which is bonded to a nucleobase, wherein each variable is independently as described in the present disclosure. In some embodiments, the nucleobase is T. In some embodiments, the nucleobase is protected T. In some embodiments, the nucleobase is optionally substituted T. In some embodiments, the connection is at the 5-carbon of a T or an optionally substituted T. In some embodiments, a provided oligonucleotide comprises one or more

[chemical structure]

wherein each variable is independently as described in the present disclosure. In some embodiments, a provided oligonucleotide comprises one or more

[chemical structure]

wherein each variable is independently as described in the present disclosure. In some embodiments, a provided oligonucleotide comprises one or more

[chemical structure]

wherein each variable is independently as described in the present disclosure. In some embodiments, a provided oligonucleotide comprises one or more

[chemical structure]

wherein each variable is independently as described in the present disclosure. In some embodiments, a provided oligonucleotide comprises one or more

[chemical structure]

wherein each variable is independently as described in the present disclosure. In some embodiments, a provided oligonucleotide comprises one or more

[chemical structure]

wherein each variable is independently as described in the present disclosure. In some embodiments, a provided oligonucleotide comprises one or more

[chemical structure]

wherein X is O or S, R¹ is H, and each other variable is independently as described in the present disclosure. In some embodiments, R^{2s} and R^{4s} are hydrogen. In some embodiments, a provided oligonucleotide comprises one or more

[chemical structure]

wherein X is O or S, R¹ is H, and each other variable is independently as described in the present disclosure.

[1071] In some embodiments, the present disclosure provides a composition comprising an APOC3 oligonucleotide comprising a lipid moiety comprising or being a C₁₀-C₄₀ linear, saturated or partially unsaturated, aliphatic chain. In some embodiments, the present disclosure provides a composition comprising an APOC3 oligonucleotide comprising a lipid moiety comprising or being a C₁₀-C₄₀ linear, saturated or partially unsaturated, aliphatic chain, optionally substituted with one or more C₁₋₄ aliphatic group.

[1072] In some embodiments, a composition comprises an APOC3 oligonucleotide comprising a lipid moiety formed through conjugation of a compound selected from: lauric acid, myristic acid, palmitic acid, stearic acid, oleic acid, linoleic acid, alpha-linolenic acid, gamma-linolenic acid, docosahexaenoic acid (cis-DHA), turbinaric acid, arachidonic acid, and dilinoleyl alcohol

[1073] In some embodiments, a linker is a moiety that connects two parts of a composition; as a non-limiting example, a linker physically connects an APOC3 oligonucleotide to a lipid. Non-limiting examples of suitable linkers include: an uncharged linker; a charged linker; a linker comprising an alkyl; a linker comprising a phosphate; a branched linker; an unbranched linker; a linker comprising at least one cleavage group; a linker comprising at least one redox cleavage group; a linker comprising at least one phosphate-based cleavage group; a linker comprising at least one acid-cleavage group; a linker comprising at least one ester-based cleavage group; a linker comprising at least one peptide-based cleavage group. In some embodiments, a linker is an uncharged linker or a charged linker. In some embodiments, a linker comprises an alkyl.

[1074] In some embodiments, a linker comprises a phosphate. In various embodiments, a phosphate can also be modified by replacement of a bridging oxygen, (i.e. oxygen that links the phosphate to the nucleoside), with nitrogen (bridged phosphoroamidates), sulfur (bridged phosphorothioates) and carbon (bridged methylenephosphonates). The replacement can occur at the either linking oxygen or at both the linking oxygens. In some embodiments, the bridging oxygen is the 3′-oxygen of a nucleoside, replacement with carbon is done. In some embodiments, the bridging oxygen is the 5′-oxygen of a nucleoside, replacement with nitrogen is done. In various embodiments, the linker comprising a phosphate comprises any one or more of: a phosphorodithioate, phosphoramidate, boranophosphonoate, or a compound of formula (I):

[chemical structure]

where R³ is selected from OH, SH, NH₂, BH₃, CH₃, C₁₋₆ alkyl, C₆₋₁₀ aryl, C₁₋₆ alkoxy and C₆₋₁₀ aryl-oxy, wherein C₁₋₆ alkyl and C₆₋₁₀ aryl are unsubstituted or optionally independently substituted with 1 to 3 groups independently selected from halo, hydroxyl and NH₂; and R⁴ is selected from O, S, NH, or CH₂.

[1075] In some embodiments, a linker comprises a direct bond or an atom such as oxygen or sulfur, a unit such as NR′, C(O), C(O)NH, SO, SO₂, SO₂NH or a chain of atoms, such as substituted or unsubstituted alkyl, substituted or unsubstituted alkenyl, substituted or unsubstituted alkynyl, arylalkyl, arylalkenyl, arylalkynyl, heteroarylalkyl, heteroarylalkenyl, heteroarylalkynyl, heterocyclylalkyl, heterocyclylalkenyl, heterocyclylalkynyl, aryl, heteroaryl, heterocyclyl, cycloalkyl, cycloalkenyl, alkylarylalkyl, alkylarylalkenyl, alkylarylalkynyl, alkenylarylalkyl, alkenylarylalkenyl, alkenylarylalkynyl, alkynylarylalkyl, alkynylarylalkenyl, alkynylarylalkynyl, alkylheteroarylalkyl, alkylheteroarylalkenyl, alkylheteroarylalkynyl, alkenylheteroarylalkyl, alkenylheteroarylalkenyl, alkenylheteroarylalkynyl, alkynylheteroarylalkyl, alkynylheteroarylalkenyl, alkynylheteroarylalkynyl, alkylheterocyclylalkyl, alkylheterocyclylalkenyl, alkylhererocyclylalkynyl, alkenylheterocyclylalkyl, alkenylheterocyclylalkenyl, alkenylheterocyclylalkynyl, alkynylheterocyclylalkyl, alkynylheterocyclylalkenyl, alkynylheterocyclylalkynyl, alkylaryl, alkenylaryl, alkynylaryl, alkylheteroaryl, alkenylheteroaryl, alkynylhereroaryl, where one or more methylenes can be interrupted or terminated by O, S, S(O), SO₂, N(R₁)₂, C(O), cleavable linking group, substituted or unsubstituted aryl, substituted or unsubstituted heteroaryl, substituted or unsubstituted heterocyclic; where R¹ is hydrogen, acyl, aliphatic or substituted aliphatic.

[1076] In some embodiments, a linker is a branched linker. In some embodiments, a branchpoint of the branched linker may be at least trivalent, but may be a tetravalent, pentavalent or hexavalent atom, or a group presenting such multiple valencies. In some embodiments, a branchpoint is —N, —N(Q)-C, —O—C, —S—C, —SS—C, —C(O)N(Q)-C, —OC(O)N(Q)-C, —N(Q)C(O)—C, or —N(Q)C(O)O—C; wherein Q is independently for each occurrence H or optionally substituted alkyl. In other embodiment, the branchpoint is glycerol or glycerol derivative.

[1077] In one embodiment, a linker comprises at least one cleavable linking group. As a non-limiting example, a cleavable linking group can be sufficiently stable outside the cell, but which upon entry into a target cell is cleaved to release the two parts the linker is holding together. As a non-limiting example, a cleavable linkage group, such as a disulfide bond can be susceptible to pH. As a non-limiting example, a linker can include a cleavable linking group that is capable of being cleaved by an enzyme. As a non-limiting example, a linker can contain a peptide bond, which can be used when targeting cell types rich in peptidases, such as liver cells and synoviocytes. As a non-limiting example, suitability of a candidate cleavable linking group can be evaluated by testing the ability of a degradative agent (or condition) to cleave the candidate linking group. In some embodiments, a linker comprises a redox cleavable linking group, a phosphate-based cleavable linking groups, which are cleavable by agents that degrade or hydrolyze the phosphate group, a linker comprises an acid cleavable linking group, an ester-based linking group, and/or a peptide-based cleaving group.

[1078] Any linker reported in the art can be used, including, as non-limiting examples, those described in: U.S. Pat. App. No. 20150265708.

[1079] In some embodiments, a lipid is conjugated to an APOC3 oligonucleotide using any method known in the art in accordance with the present disclosure.

### Targeting Moieties

[1080] In some embodiments, a provided oligonucleotide or oligonucleotide composition further comprises a targeting component or moiety. A targeting moiety can be either conjugated or not conjugated to an APOC3 oligonucleotide moiety. In some embodiments, a targeting moiety is a lipid. In some embodiments, a targeting moiety is a carbohydrate or a bicyclic ketal. In some embodiments, a targeting moiety is —R^{LD} as described in the present disclosure. In some embodiments, a targeting moiety is —R^{CD} as described in the present disclosure.

[1081] Targeting moieties can be incorporated into provided technologies through many types of methods in accordance with the present disclosure, for example, those described for lipids and carbohydrates. In some embodiments, targeting moieties are physically mixed with provided oligonucleotides to form provided compositions. In some embodiments, a targeting moiety is conjugated to an APOC3 oligonucleotide. In some embodiments, a targeting moiety is not conjugated to an APOC3 oligonucleotide.

[1082] In some embodiments, provided compositions comprise two or more targeting moieties. In some embodiments, provided oligonucleotides comprise two or more conjugated targeting moieties. In some embodiments, the two or more conjugated targeting moieties are the same. In some embodiments, the two or more conjugated targeting moieties are different. In some embodiments, provided oligonucleotides comprise no more than one targeting moiety. In some embodiments, oligonucleotides of a provided composition comprise different types of conjugated targeting moieties. In some embodiments, oligonucleotides of a provided composition comprise the same type of targeting moieties.

[1083] Targeting moieties can be conjugated to oligonucleotides optionally through linkers, for example, as described for lipids and carbohydrates. Various types of linkers in the art can be utilized in accordance of the present disclosure. In some embodiments, a linker comprises a phosphate group, which can, for example, be used for conjugating targeting moieties through chemistry similar to those employed in oligonucleotide synthesis. In some embodiments, a linker comprises an amide, ester, or ether group. In some embodiments, a linker has the structure of -L-. Targeting moieties can be conjugated through either the same or different linkers compared to lipids.

[1084] Targeting moieties, optionally through linkers, can be conjugated to oligonucleotides at various suitable locations. In some embodiments, targeting moieties are conjugated through the 5′—OH group. In some embodiments, targeting moieties are conjugated through the 3′—OH group. In some embodiments, targeting moieties are conjugated through one or more sugar moieties. In some embodiments, targeting moieties are conjugated through one or more bases. In some embodiments, targeting moieties are incorporated through one or more internucleotidic linkages. In some embodiments, an APOC3 oligonucleotide may contain multiple conjugated targeting moieties which are independently conjugated through its 5′-OH, 3′-OH, sugar moieties, base moieties and/or internucleotidic linkages. Targeting moieties and lipids can be conjugated either at the same, neighboring and/or separated locations. In some embodiments, a targeting moiety is conjugated at one end of an APOC3 oligonucleotide, and a lipid is conjugated at the other end.

[1085] In some embodiments, a targeting moiety interacts with a protein on the surface of targeted cells. In some embodiments, such interaction facilitates internalization into targeted cells. In some embodiments, a targeting moiety comprises a sugar moiety. In some embodiments, a targeting moiety comprises a polypeptide moiety. In some embodiments, a targeting moiety comprises an antibody. In some embodiments, a targeting moiety is an antibody. In some embodiments, a targeting moiety comprises an inhibitor. In some embodiments, a targeting moiety is a moiety from a small molecule inhibitor. In some embodiments, an inhibitor is an inhibitor of a protein on the surface of targeted cells. In some embodiments, an inhibitor is a carbonic anhydrase inhibitor. In some embodiments, an inhibitor is a carbonic anhydrase inhibitor expressed on the surface of target cells. In some embodiments, a carbonic anhydrase is I, II, III, IV, V, VI, VII, VIII, IX, X, XI, XII, XIII, XIV, XV or XVI. In some embodiments, a carbonic anhydrase is membrane bound. In some embodiments, a carbonic anhydrase is IV, IX, XII or XIV. In some embodiments, an inhibitor is for IV, IX, XII and/or XIV. In some embodiments, an inhibitor is a carbonic anhydrase III inhibitor. In some embodiments, an inhibitor is a carbonic anhydrase IV inhibitor. In some embodiments, an inhibitor is a carbonic anhydrase IX inhibitor. In some embodiments, an inhibitor is a carbonic anhydrase XII inhibitor. In some embodiments, an inhibitor is a carbonic anhydrase XIV inhibitor. In some embodiments, an inhibitor comprises or is a sulfonamide (e.g., those described in Supuran, Conn. Nature Rev Drug Discover 2008, 7, 168-181, which sulfonamides are incorporated herein by reference). In some embodiments, an inhibitor is a sulfonamide. In some embodiments, targeted cells are muscle cells.

[1086] In some embodiments, a targeting moiety is R^{TD}, wherein R^{TD} is R^{LD} or R^{CD} as described in the present disclosure.

[1087] In some embodiments, a targeting moiety is R^{LD} as defined and described in the present disclosure. In some embodiments, the present disclosure provides oligonucleotides comprising R^{LD}. In some embodiments, the present disclosure provides oligonucleotide compositions comprising oligonucleotides comprising R^{LD}. In some embodiments, the present disclosure provides oligonucleotide compositions comprising a first plurality of oligonucleotides comprising R^{LD}. In some embodiments, the present disclosure provides chirally controlled oligonucleotide compositions of oligonucleotides comprising R^{LD}.

[1088] In some embodiments, a targeting moiety is R^{CD} as defined and described in the present disclosure. In some embodiments, the present disclosure provides oligonucleotides comprising R^{CD}. In some embodiments, the present disclosure provides oligonucleotide compositions comprising oligonucleotides comprising R^{CD}. In some embodiments, the present disclosure provides oligonucleotide compositions comprising a first plurality of oligonucleotides comprising R^{CD}. In some embodiments, the present disclosure provides chirally controlled oligonucleotide compositions of oligonucleotides comprising R^{CD}.

[1089] In some embodiments, R^{TD} comprises or is

[chemical structure]

In some embodiments, R^{TD}comprises or is

[chemical structure]

In some embodiments, R^{TD} comprises or is

[chemical structure]

In some embodiments, R^{ID} comprises or is

[chemical structure]

In some embodiments, R^{TD} comprises or is

[chemical structure]

In some embodiments, R^{TD} comprises or is

[chemical structure]

In some embodiments, R^{TD} comprises or is

[chemical structure]

In some embodiments, R^{TD} comprises or is

[chemical structure]

In some embodiments, R^{TD} comprises or is

[chemical structure]

In some embodiments, R^{TD} comprises or is

[chemical structure]

In some embodiments, R^{TD} comprises or

[chemical structure]

In some embodiments, R^{TD} comprises or is

[chemical structure]

In some embodiments, R^{TD} comprises or is

[chemical structure]

In some embodiments, R^{TD} comprises or is

[chemical structure]

X═O or S. In some embodiments, R^{TD} comprises or is

[chemical structure]

In some embodiments, R^{TD} is a targeting moiety that comprises or is a lipid moiety. In some embodiments, X is O. In some embodiments, X is S.

[1090] In some embodiments, the present disclosure provides technologies (e.g., reagents, methods, etc.) for conjugating various moieties to oligonucleotide moieties. In some embodiments, the present disclosure provides technologies for conjugating targeting moiety to oligonucleotide moieties. In some embodiments, the present disclosure provides acids comprising targeting moieties for conjugation, e.g., R^{LD}—COOH. In some embodiments, the present disclosure provides linkers for conjugation, e.g., L^{M}. A person having ordinary skill in the art understands that many known and widely practiced technologies can be utilized for conjugation with oligonucleotide moieties in accordance with the present disclosure. In some embodiments, a provided acid is

[chemical structure]

In some embodiments, a provided acid is

[chemical structure]

In some embodiments, a provided acid is

[chemical structure]

In some embodiments, a provided acid is

[chemical structure]

In some embodiments, a provided acid is a fatty acid, which can provide a lipid moiety as a targeting moiety. In some embodiments, the present disclosure provides methods and reagents for preparing such acids.

[1091] In some embodiments, an APOC3 oligonucleotide, an APOC3 oligonucleotide capable of directing a decrease in the expression and/or level of a target gene or its gene product can comprise any lipid described herein or known in the art.

[1092] In some embodiments, an APOC3 oligonucleotide, an APOC3 oligonucleotide that directs RNA interference, an APOC3 oligonucleotide that directs RNase H-mediated knockdown, or an APOC3 oligonucleotide that directs both RNA interference and RNase H-mediated knockdown can comprise any lipid described herein or known in the art.

[1093] In some embodiments, a provided oligonucleotide comprises a lipid moiety. In some embodiments, a lipid moiety is incorporated by conjugation with a lipid. In some embodiments, a lipid is a fatty acid. In some embodiments, an APOC3 oligonucleotide is conjugated to a fatty acid. In some embodiments, a provided single-stranded RNAi agent comprises a lipid. In some embodiments, a provided single-stranded RNAi agent comprises a lipid conjugated to a nucleotide in the seed region. In some embodiments, a provided single-stranded RNAi agent comprises a lipid conjugated to a nucleotide in the post-seed region. In some embodiments, a provided single-stranded RNAi agent comprises a lipid conjugated at the 1^{st}, 2^{nd}, 3 ^{rd}, 4 ^{th}, 5 ^{th}, 6 ^{th}, 7 ^{th}, 8 ^{th}, 9 ^{th}, 10 ^{th}, 11 ^{th}, 12 ^{th}, 13 ^{th}, 14 ^{th}, 15 ^{th}, 16 ^{th}, 17 ^{th}, 18 ^{th}, 19 ^{th}, 20 ^{th}, 21^{st}, 22^{nd}, 23^{rd}, 24^{th}, or 25^{th} nucleotide (counting from the 5′-end). In some embodiments, a provided single-stranded RNAi agent comprises a lipid conjugated at the 9^{th} or 11^{th} nucleotide (counting from the 5′-end). In some embodiments, an APOC3 oligonucleotide is conjugated at the base to a fatty acid. In some embodiments, a provided single-stranded RNAi agent comprises a lipid. In some embodiments, a provided single-stranded RNAi agent comprises a lipid conjugated at the base at the 9^{th} or 11^{th} nucleotide (counting from the 5′-end).

[1094] In some embodiments, a fatty acid comprises 10, 11, 12, 13, 14, 15, 16, 17, 18, 19, 20, 21, 22, 23, 24, 25, 26, 27, 28, 29, 30 or more carbon atoms. In some embodiments, a fatty acid comprises 10 or more carbon atoms. In some embodiments, a fatty acid comprises 11 or more carbon atoms. In some embodiments, a fatty acid comprises 12 or more carbon atoms. In some embodiments, a fatty acid comprises 13 or more carbon atoms. In some embodiments, a fatty acid comprises 14 or more carbon atoms. In some embodiments, a fatty acid comprises 15 or more carbon atoms. In some embodiments, a fatty acid comprises 16 or more carbon atoms. In some embodiments, a fatty acid comprises 17 or more carbon atoms. In some embodiments, a fatty acid comprises 18 or more carbon atoms. In some embodiments, a fatty acid comprises 19 or more carbon atoms. In some embodiments, a fatty acid comprises 20 or more carbon atoms. In some embodiments, a fatty acid comprises 30 or more carbon atoms.

[1095] In some embodiments, a lipid is palmitic acid. In some embodiments, a lipid is stearic acid or turbinaric acid. In some embodiments, a lipid is stearic acid acid. In some embodiments, a lipid is turbinaric acid.

[1096] In some embodiments, a lipid comprises an optionally substituted, C₁₀-C₈₀ saturated or partially unsaturated aliphatic group, wherein one or more methylene units are optionally and independently replaced by an optionally substituted group selected from C₁-C₆ alkylene, C₁-C₆ alkenylene, —C≡C—, a C₁-C₆ heteroaliphatic moiety, —C(R′)₂, —Cy-, —O—, —S—, —S—S—, —N(R′)—, —C(O)—, —C(S)—, —C(NR′)—, —C(O)N(R′)—, —N(R′)C(O)N(R′)—, —N(R′)C(O)—, —N(R′)C(O)O—, —OC(O)N(R′)—, —S(O)—, —S(O)₂—, —S(O)₂N(R′)—, —N(R′)S(O)₂—, —SC(O)—, —C(O)S—, —OC(O)—, and —C(O)O—, wherein each variable is independently as defined and described herein.

[1097] In some embodiments, a lipid comprises an optionally substituted C₁₀-C₆₀ saturated or partially unsaturated, aliphatic chain.

[1098] In some embodiments, a lipid comprises an optionally substituted C₁₀-C₆₀ linear, saturated or partially unsaturated, aliphatic chain.

[1099] In some embodiments, a lipid comprises a C₁₀-C₆₀ linear, saturated or partially unsaturated, aliphatic chain, optionally substituted with one or more C₁₋₄ aliphatic group.

[1100] In some embodiments, a lipid comprises an optionally substituted, C₁₀-C₆₀ saturated or partially unsaturated aliphatic group, wherein one or more methylene units are optionally and independently replaced by an optionally substituted group selected from C₁-C₆ alkylene, C₁-C₆ alkenylene, —C≡C—, a C₁-C₆ heteroaliphatic moiety, —C(R′)₂, —Cy-, —O—, —S—, —S—S—, —N(R′)—, —C(O)—, —C(S)—, —C(NR′)—, —C(O)N(R′)—, —N(R′)C(O)N(R′)—, —N(R′)C(O)—, —N(R′)C(O)O—, —OC(O)N(R′)—, —S(O)—, —S(O)₂—, —S(O)₂N(R′)—, —N(R′)S(O)₂—, —SC(O)—, —C(O)S—, —OC(O)—, and —C(O)O—, wherein each variable is independently as defined and described herein.

[1101] In some embodiments, a lipid comprises an optionally substituted C₁₀-C₆₀ saturated or partially unsaturated, aliphatic chain.

[1102] In some embodiments, a lipid comprises an optionally substituted C₁₀-C₆₀ linear, saturated or partially unsaturated, aliphatic chain.

[1103] In some embodiments, a lipid comprises a C₁₀-C₆₀ linear, saturated or partially unsaturated, aliphatic chain, optionally substituted with one or more C₁₋₄ aliphatic group.

[1104] In some embodiments, a lipid comprises an optionally substituted, C₁₀-C₄₀ saturated or partially unsaturated aliphatic group, wherein one or more methylene units are optionally and independently replaced by an optionally substituted group selected from C₁-C₆ alkylene, C₁-C₆ alkenylene, —C≡C—, a C₁-C₆ heteroaliphatic moiety, —C(R′)₂, —Cy-, —O—, —S—, —S—S—, —N(R′)—, —C(O)—, —C(S)—, —C(NR′)—, —C(O)N(R′)—, —N(R′)C(O)N(R′)—, —N(R′)C(O)—, —N(R′)C(O)O—, —OC(O)N(R′)—, —S(O)—, —S(O)₂—, —S(O)₂N(R′)—, —N(R′)S(O)₂—, —SC(O)—, —C(O)S—, —OC(O)—, and —C(O)O—, wherein each variable is independently as defined and described herein.

[1105] In some embodiments, a lipid comprises an optionally substituted C₁₀-C₆₀ saturated or partially unsaturated, aliphatic chain.

[1106] In some embodiments, a lipid comprises an optionally substituted C₁₀-C₆₀ linear, saturated or partially unsaturated, aliphatic chain.

[1107] In some embodiments, a lipid comprises a C₁₀-C₆₀ linear, saturated or partially unsaturated, aliphatic chain, optionally substituted with one or more C₁₋₄ aliphatic group.

[1108] In some embodiments, a lipid comprises an unsubstituted C₁₀-C₈₀ linear, saturated or partially unsaturated, aliphatic chain.

[1109] In some embodiments, a lipid comprises no more than one optionally substituted C₁₀-C₆₀ linear, saturated or partially unsaturated, aliphatic chain.

[1110] In some embodiments, a lipid comprises two or more optionally substituted C₁₀-C₆₀ linear, saturated or partially unsaturated, aliphatic chain.

[1111] In some embodiments, a lipid comprises an unsubstituted C₁₀-C₆₀ linear, saturated or partially unsaturated, aliphatic chain.

[1112] In some embodiments, a lipid comprises no more than one optionally substituted C₁₀-C₆₀ linear, saturated or partially unsaturated, aliphatic chain.

[1113] In some embodiments, a lipid comprises two or more optionally substituted C₁₀-C₆₀ linear, saturated or partially unsaturated, aliphatic chain.

[1114] In some embodiments, a lipid comprises an unsubstituted C₁₀-C₄₀ linear, saturated or partially unsaturated, aliphatic chain.

[1115] In some embodiments, a lipid comprises no more than one optionally substituted C₁₀-C₆₀ linear, saturated or partially unsaturated, aliphatic chain.

[1116] In some embodiments, a lipid comprises two or more optionally substituted C₁₀-C₆₀ linear, saturated or partially unsaturated, aliphatic chain.

[1117] In some embodiments, a lipid comprises a C₁₀-C₄₀ linear, saturated or partially unsaturated, aliphatic chain.

[1118] In some embodiments, a lipid comprises a C₁₀-C₃₀ linear, saturated or partially unsaturated, aliphatic chain.

[1119] In some embodiments, a lipid comprises a C₁₀-C₂₀ linear, saturated or partially unsaturated, aliphatic chain.

[1120] In some embodiments, a lipid comprises a C₁₀-C₁₆ linear, saturated or partially unsaturated, aliphatic chain.

[1121] In some embodiments, a lipid comprises a C₁₂-C₁₆ linear, saturated or partially unsaturated, aliphatic chain.

[1122] In some embodiments, a lipid comprises a C₁₄-C₁₆ linear, saturated or partially unsaturated, aliphatic chain.

[1123] In some embodiments, a lipid comprises a C₁₀-C₄₀ linear, saturated or partially unsaturated, aliphatic chain, optionally substituted with one or more C₁₋₄ aliphatic group.

[1124] In some embodiments, a lipid is selected from the group consisting of: lauric acid, myristic acid, palmitic acid, stearic acid, oleic acid, linoleic acid, alpha-linolenic acid, gamma-linolenic acid, docosahexaenoic acid (DHA or cis-DHA), turbinaric acid and dilinoleyl.

[1125] In some embodiments, a lipid is not conjugated to the oligonucleotide.

[1126] In some embodiments, a lipid is conjugated to the oligonucleotide.

[1127] In some embodiments, a lipid is conjugated to the oligonucleotide with a linker. In some embodiments, a linker has the structure of -L-.

[1128] In some embodiments, a targeting moiety is conjugated to an APOC3 oligonucleotide. In some embodiments, a provided oligonucleotide comprises one or more targeting moieties. In some embodiments, a targeting moiety is conjugated via a linker.

[1129] In some embodiments, a provided oligonucleotide comprises one or more lipid moieties, and one or more targeting moieties.

[1130] In some embodiments, a provided single-stranded RNAi agent comprises a lipid. In some embodiments, a provided single-stranded RNAi agent comprises a lipid moiety, wherein the lipid is C₁₆ linear. In some embodiments, a provided single-stranded RNAi agent comprises a lipid, wherein the lipid is palmitic acid.

[1131] In some embodiments, a provided single-stranded RNAi agent comprises a lipid conjugated to a base. In some embodiments, a provided single-stranded RNAi agent comprises a lipid, wherein the lipid is C₁₆ linear conjugated to a base. In some embodiments, a provided single-stranded RNAi agent comprises a lipid, wherein the lipid is palmitic acid conjugated to a base.

[1132] In some embodiments, the present disclosure pertains to a chirally controlled oligonucleotide composition, wherein the composition further comprises a lipid. In some embodiments, a lipid is stearic acid or turbinaric acid. In some embodiments, a lipid is conjugated to the oligonucleotide.

[1133] In some embodiments, conjugation of a lipid to an APOC3 oligonucleotide improves at least one property of the oligonucleotide. In some embodiments, the property is increased activity (e.g., increased ability to mediate single-stranded RNA interference), or improved distribution to a tissue. In some embodiments, lipid conjugation improves activity. In some embodiments, lipid conjugation improves deliveries to one or more target tissues. In some embodiments, the tissue is muscle tissue. In some embodiments, the tissue is skeletal muscle, gastrocnemius, triceps, heart or diaphragm.

[1134] In some embodiments, a lipid comprises an optionally substituted, C10-C80 saturated or partially unsaturated aliphatic group, wherein one or more methylene units are optionally and independently replaced by an optionally substituted group selected from C1-C6 alkylene, C1-C6 alkenylene, a C1-C6 heteroaliphatic moiety, —C(R)₂—, —Cy-, —O—, —S—, —S—S—, —N(R)—, —C(O)—, —C(S)—, —C(NR)—, —C(O)N(R)—, —N(R)C(O)N(R), —N(R)C(O)—, —N(R)C(O)O—, —OC(O)N(R)—, —S(O)—, —S(O)2-, —S(O)2N(R)—, —N(R)S(O)₂—, —SC(O)—, —C(O)S—, —OC(O)—, and —C(O)O—, wherein each variable is independently as defined and described herein. In some embodiments, a lipid comprises an optionally substituted C10-C60 saturated or partially unsaturated, aliphatic chain. In some embodiments, a lipid comprises an optionally substituted C10-C60 linear, saturated or partially unsaturated, aliphatic chain. In some embodiments, a lipid comprises a C10-C60 linear, saturated or partially unsaturated, aliphatic chain, optionally substituted with one or more C1-4 aliphatic group. In some embodiments, a lipid comprises an optionally substituted, C10-C60 saturated or partially unsaturated aliphatic group, wherein one or more methylene units are optionally and independently replaced by an optionally substituted group selected from C1-C6 alkylene, C1-C6 alkenylene, a C1-C6 heteroaliphatic moiety, —C(R)₂—, —Cy-, —O—, —S—, —S—S—, —N(R)—, —C(O)—, —C(S)—, —C(NR)—, —C(O)N(R)—, —N(R)C(O)N(R), —N(R)C(O)—, —N(R)C(O)O—, —OC(O)N(R)—, —S(O)—, —S(O)₂—, —S(O)₂N(R)—, —N(R)S(O)₂—, —SC(O)—, —C(O)S—, —OC(O)—, and —C(O)O—, wherein each variable is independently as defined and described herein. In some embodiments, a lipid comprises an optionally substituted C10-C60 saturated or partially unsaturated, aliphatic chain. In some embodiments, a lipid comprises an optionally substituted C10-C60 linear, saturated or partially unsaturated, aliphatic chain. In some embodiments, a lipid comprises a C10-C60 linear, saturated or partially unsaturated, aliphatic chain, optionally substituted with one or more C1-4 aliphatic group. In some embodiments, a lipid comprises an optionally substituted, C10-C40 saturated or partially unsaturated aliphatic group, wherein one or more methylene units are optionally and independently replaced by an optionally substituted group selected from C1-C6 alkylene, C1-C6 alkenylene, a C1-C6 heteroaliphatic moiety, —C(R)₂—, —Cy-, —O—, —S—, —S—S—, —N(R)—, —C(O)—, —C(S)—, —C(NR)—, —C(O)N(R)—, —N(R)C(O)N(R), —N(R)C(O)—, —N(R)C(O)O—, —OC(O)N(R)—, —S(O)—, —S(O)₂—, —S(O)₂N(R)—, —N(R)S(O)₂—, —SC(O)—, —C(O)S—, —OC(O)—, and —C(O)O—, wherein each variable is independently as defined and described herein. In some embodiments, a lipid comprises an optionally substituted C10-C60 saturated or partially unsaturated, aliphatic chain. In some embodiments, a lipid comprises an optionally substituted C10-C60 linear, saturated or partially unsaturated, aliphatic chain. In some embodiments, a lipid comprises a C10-C60 linear, saturated or partially unsaturated, aliphatic chain, optionally substituted with one or more C1-4 aliphatic group. In some embodiments, a lipid comprises an unsubstituted C10-C80 linear, saturated or partially unsaturated, aliphatic chain. In some embodiments, a lipid comprises no more than one optionally substituted C10-C60 linear, saturated or partially unsaturated, aliphatic chain. In some embodiments, a lipid comprises two or more optionally substituted C10-C60 linear, saturated or partially unsaturated, aliphatic chain. In some embodiments, a lipid comprises an unsubstituted C10-C60 linear, saturated or partially unsaturated, aliphatic chain. In some embodiments, a lipid comprises no more than one optionally substituted C10-C60 linear, saturated or partially unsaturated, aliphatic chain. In some embodiments, a lipid comprises two or more optionally substituted C10-C60 linear, saturated or partially unsaturated, aliphatic chain. In some embodiments, a lipid comprises an unsubstituted C10-C40 linear, saturated or partially unsaturated, aliphatic chain. In some embodiments, a lipid comprises no more than one optionally substituted C10-C60 linear, saturated or partially unsaturated, aliphatic chain. In some embodiments, a lipid comprises two or more optionally substituted C10-C60 linear, saturated or partially unsaturated, aliphatic chain. In some embodiments, a lipid comprises a C10-C40 linear, saturated or partially unsaturated, aliphatic chain. In some embodiments, a lipid comprises a C10-C40 linear, saturated or partially unsaturated, aliphatic chain, optionally substituted with one or more C1-4 aliphatic group. In some embodiments, the lipid is selected from the group consisting of: lauric acid, myristic acid, palmitic acid, stearic acid, oleic acid, linoleic acid, alpha-linolenic acid, gamma-linolenic acid, docosahexaenoic acid (cis-DHA), turbinaric acid and dilinoleyl. In some embodiments, the lipid is not conjugated to the oligonucleotide. In some embodiments, the lipid is conjugated to the oligonucleotide.

[1135] In some embodiments, conjugation of a lipid to an APOC3 oligonucleotide surprisingly improves at least one property of the oligonucleotide. In some embodiments, the property is increased activity (e.g., increased ability to mediate single-stranded RNA interference), or improved distribution to a tissue. In some embodiments, the tissue is muscle tissue. In some embodiments, the tissue is skeletal muscle, gastrocnemius, triceps, heart or diaphragm. In some embodiments, oligonucleotides comprising lipid moieties form, for example, micelles. In some embodiments, example improved properties are demonstrated, e.g., in one or more of the Figures.

[1136] In some embodiments, when assaying example oligonucleotides in mice, tested oligonucleotides are intravenous injected via tail vein in male C57BL/10ScSnDMDmdx mice (4-5 weeks old), at tested amounts, e.g., 10 mg/kg, 30 mg/kg, etc. In some embodiments, tissues are harvested at tested times, e.g., on Day, e.g., 2, 7 and/or 14, etc., after injection, in some embodiments, fresh-frozen in liquid nitrogen and stored in −80° C. until analysis.

[1137] Various assays can be used to assess oligonucleotide levels in accordance with the present disclosure. In some embodiments, hybrid-ELISA is used to quantify oligonucleotide levels in tissues using test article serial dilution as standard curve: for example, in an example procedure, maleic anhydride activated 96 well plate (Pierce 15110) was coated with 50 l of capture probe at 500 nM in 2.5% NaHCO₃ (Gibco, 25080-094) for 2 hours at 37° C. The plate was then washed 3 times with PBST (PBS+0.1% Tween-20), and blocked with 5% fat free milk-PBST at 37° C. for 1 hour. Test article oligonucleotide was serial diluted into matrix. This standard together with original samples were diluted with lysis buffer (4 M Guanidine; 0.33% N-Lauryl Sarcosine; 25 mM Sodium Citrate; 10 mM DTT) so that oligonucleotide amount in all samples is less than 100 ng/ml. 20 l of diluted samples were mixed with 180 l of 333 nM detection probe diluted in PBST, then denatured in PCR machine (65° C., 10 min, 95° C., 15 min, 4° C.). 50 l of denatured samples were distributed in blocked ELISA plate in triplicates, and incubated overnight at 4° C. After 3 washes of PBST, 1:2000 streptavidin-AP in PBST was added, 50 l per well and incubated at room temperature for 1 hour. After extensive wash with PBST, 100 l of AttoPhos (Promega S1000) was added, incubated at room temperature in dark for 10 min and read on plate reader (Molecular Device, M5) fluorescence channel. Ex435 nm, Em555 nm. Oligonucleotides in samples were calculated according to standard curve by 4-parameter regression.

[1138] As described and demonstrated in the present disclosure, in some embodiments, lipid conjugation improves delivery to a tissue. In some embodiments, lipid conjugation improves delivery to muscle. In some embodiments, lipid conjugation comprises conjugation with a fatty acid. In some embodiments, oligonucleotides are conjugated with turbinaric acid. In some embodiments, conjugation with turbinaric acid is particularly effective in improving oligonucleotide delivery to muscle.

[1139] In some embodiments, provided oligonucleotides are stable in both plasma and tissue homogenates.

[1140] In some embodiments, a provided single-stranded RNAi agent comprises a lipid conjugated at position 9 or 11 (counting from the 5′-end). In some embodiments, a provided single-stranded RNAi agent comprises a lipid, wherein the lipid is C₁₆ linear conjugated at position 9 or 11 (counting from the 5′-end). In some embodiments, a provided single-stranded RNAi agent comprises a lipid, wherein the lipid is palmitic acid conjugated at position 9 or 11 (counting from the 5′-end).

[1141] In some embodiments, a provided single-stranded RNAi agent comprises a lipid conjugated to a base at position 9 or 11 (counting from the 5′-end). In some embodiments, a provided single-stranded RNAi agent comprises a lipid, wherein the lipid is C₁₆ linear conjugated to a base at position 9 or 11 (counting from the 5′-end). In some embodiments, a provided single-stranded RNAi agent comprises a lipid, wherein the lipid is palmitic acid conjugated to a base at position 9 or 11 (counting from the 5′-end).

[1142] In some embodiments, a provided single-stranded RNAi agent comprises a lipid conjugated to a U base at position 9 or 11 (counting from the 5′-end). In some embodiments, a provided single-stranded RNAi agent comprises a lipid, wherein the lipid is C₁₆ linear conjugated to a U base at position 9 or 11 (counting from the 5′-end). In some embodiments, a provided single-stranded RNAi agent comprises a lipid, wherein the lipid is palmitic acid conjugated to a U base at position 9 or 11 (counting from the 5′-end).

[1143] In some embodiments, a provided single-stranded RNAi comprises a structure of ImU, or 5′-lipid-2′OMeU.

[chemical structure]

[1144] In some embodiments, an APOC3 oligonucleotide, an APOC3 oligonucleotide that directs RNA interference, an APOC3 oligonucleotide that directs RNase H-mediated knockdown, or an APOC3 oligonucleotide that directs both RNA interference and RNase H-mediated knockdown can comprise any additional chemical moiety, including but not limited to, a lipid, described in any of U.S. Pat. Nos. 5,614,503; 5,780,009; 6,074,863; 6,258,581; 6,489,117; 6,677,445; 6,828,435; 6,846,921; 7,416,849; 7,494,982; 7,981,871; 8,106,022; 8,148,344; 8,318,508; 8,389,707; 8,450,467; 8,507,455; 8,703,731; 8,828,956; 8,901,046; 9,107,904; 9,352,048; 9,370,581; 9,370,582; 9,387,257; 9,388,415; 9,388,416; 9,393,316; and 9,404,112.

[1145] Optional Additional Chemical Moieties Conjugated to an APOC3 Oligonucleotide: A Carbohydrate Moiety or a Bicyclic Ketal, Including but not Limited to, a GalNAc Moiety

[1146] In some embodiments, provided oligonucleotides or oligonucleotide compositions comprise one or more carbohydrates or carbohydrate moieties or bicyclic ketal moieties. In some embodiments, a carbohydrate moiety is a carbohydrate. In some embodiments, a carbohydrate moiety is or comprises a carbohydrate which is conjugated directly or indirectly to an APOC3 oligonucleotide. In some embodiments, carbohydrate moieties facilitate targeted delivery of oligonucleotides to desired locations, e.g., cells, tissues, organs, etc. In some embodiments, provided carbohydrate moieties facilitate delivery to liver. As appreciated by a personal having ordinary skill in the art, various carbohydrate moieties are described in the literature and can be utilized in accordance with the present disclosure.

[1147] Carbohydrate moieties can be incorporated into oligonucleotides at various locations, for example, sugar units, internucleotidic linkage units, nucleobase units, etc., optionally through one or more bivalent or multivalent (which can be used to connect two or more carbohydrate moieties to oligonucleotides) linkers. In some embodiments, the present disclosure provides technologies for carbohydrate incorporation into oligonucleotides. In some embodiments, the present disclosure provides technologies for incorporating carbohydrate moieties, optionally through one or more linkers, at nucleobase units, as alternative and/or addition to incorporation at internucleotidic linkages and/or sugar units, thereby providing enormous flexibility and/or improved properties and/or activities. In some embodiments, a provided oligonucleotide comprises at least one carbohydrate moiety, optionally through a linker, incorporated into the oligonucleotide at a nucleobase unit.

[1148] In some embodiments, a linker is L^{M}, wherein L^{M} is a covalent bond, or a bivalent or multivalent, optionally substituted, linear or branched group selected from a C₁₋₁₀₀ aliphatic group and a C₁₋₁₀₀ heteroaliphatic group having 1-30 heteroatoms independently selected from oxygen, nitrogen, sulfur, phosphorus, boron and silicon, wherein one or more methylene units are optionally and independently replaced with C₁₋₆ alkylene, C₁₋₆ alkenylene, —C≡C—, —C(R′)₂—, —O—, —S—, —S—S—, —N(R′)—, —C(O)—, —C(S)—, —C(NR′)—, —C(O)N(R′)—, —N(R′)C(O)N(R′)—, —N(R′)C(O)O—, —S(O)—, —S(O)₂—, —S(O)₂N(R′)—, —C(O)S—, —C(O)O—, —P(O)(OR′)—, —P(O)(SR′)—, —P(O)(R′)—, —P(O)(NR′)—, —P(S)(OR′)—, —P(S)(SR′)—, —P(S)(R′)—, —P(S)(NR′)—, —P(R′)—, —P(OR′)—, —P(SR′)—, —P(NR′)—, —P(OR′)[B(R′)₃]—, —OP(O)(OR′)O—, —OP(O)(SR′)O—, —OP(O)(R′)O—, —OP(O)(NR′)O—, —OP(OR′)O—, —OP(SR′)O—, —OP(NR′)O—, —OP(R′)O—, or —OP(OR′)[B(R′)₃]O—; and one or more carbon atoms are optionally and independently replaced with Cy. In some embodiments, L^{M} is bivalent. In some embodiments, L^{M} is multivalent. In some embodiments, L^{M} is

[chemical structure]

wherein L^{M} is directly bond to a nucleobase, for example, as in:

[chemical structure]

In some embodiments, L^{M} is

[chemical structure]

In some embodiments, L^{M} is

[chemical structure]

In some embodiments, L^{M} is

[chemical structure]

In some embodiments,

[chemical structure]

[1149] L^{M} is

[1150] In some embodiments, a carbohydrate moiety or bicyclic ketal or bicyclic ketal moiety is R^{CD}, wherein R^{CD} is an optionally substituted, linear or branched group selected from a C₁₋₁₀₀ aliphatic group and a C₁₋₁₀₀ heteroaliphatic group having 1-30 heteroatoms independently selected from oxygen, nitrogen, sulfur, phosphorus, boron and silicon, wherein one or more methylene units are optionally and independently replaced with C₁₋₆ alkylene, C₁₋₆ alkenylene, —C≡C—, —C(R′)₂—, —O—, —S—, —S—S—, —N(R′)—, —C(O)—, —C(S)—, —C(NR′)—, —C(O)N(R′)—, —N(R′)C(O)N(R′)—, —N(R′)C(O)O—, —S(O)—, —S(O)₂—, —S(O)₂N(R′)—, —C(O)S—, —C(O)O—, —P(O)(OR′)—, —P(O)(SR′)—, —P(O)(R′)—, —P(O)(NR′)—, —P(S)(OR′)—, —P(S)(SR′)—, —P(S)(R′)—, —P(S)(NR′)—, —P(R′)—, —P(OR′)—, —P(SR′)—, —P(NR′)—, —P(OR′)[B(R′)₃]—, —OP(O)(OR′)O—, —OP(O)(SR′)O—, —OP(O)(R′)O—, —OP(O)(NR′)O—, —OP(OR′)O—, —OP(SR′)O—, —OP(NR′)O—, —OP(R′)O—, or —OP(OR′)[B(R′)₃]O—; and one or more carbon atoms are optionally and independently replaced with Cy^{L}. In some embodiments, R^{CD} is an optionally substituted, linear or branched group selected from a C₁₋₁₀₀ aliphatic group and a C₁₋₁₀₀ heteroaliphatic group having 1-30 heteroatoms independently selected from oxygen, nitrogen, sulfur, phosphorus, boron and silicon, wherein one or more methylene units are optionally and independently replaced with C₁₋₆ alkylene, C₁₋₆ alkenylene, —C≡C—, —C(R′)₂—, —O—, —S—, —S—S—, —N(R′)—, —C(O)—, —C(S)—, —C(NR′)—, —C(O)N(R′)—, —N(R′)C(O)N(R′)—, —N(R′)C(O)O—, —S(O)—, —S(O)₂—, —S(O)₂N(R′)—, —C(O)S—, —C(O)O—, —P(O)(OR′)—, —P(O)(SR′)—, —P(O)(R′)—, —P(O)(NR′)—, —P(S)(OR′)—, —P(S)(SR′)—, —P(S)(R′)—, —P(S)(NR′)—, —P(R′)—, —P(OR′)—, —P(SR′)—, —P(NR′)—, —P(OR′)[B(R′)₃]—, —OP(O)(OR′)O—, —OP(O)(SR′)O—, —OP(O)(R′)O—, —OP(O)(NR′)O—, —OP(OR′)O—, —OP(SR′)O—, —OP(NR′)O—, —OP(R′)O—, or —OP(OR′)[B(R′)₃]O—; and one or more carbon atoms are independently replaced with a tetravalent monosaccharide, disaccharide or polysaccharide moiety. In some embodiments, R^{CD} is an optionally substituted, linear or branched group selected from a C₁₋₁₀₀ aliphatic group and a C₁₋₁₀₀ heteroaliphatic group having 1-30 heteroatoms independently selected from oxygen, nitrogen, sulfur, phosphorus, boron and silicon, wherein one or more methylene units are optionally and independently replaced with C₁₋₆ alkylene, C₁₋₆ alkenylene, —C≡C—, —C(R′)₂—, —O—, —S—, —S—S—, —N(R′)—, —C(O)—, —C(S)—, —C(NR′)—, —C(O)N(R′)—, —N(R′)C(O)N(R′)—, —N(R′)C(O)O—, —S(O)—, —S(O)₂—, —S(O)₂N(R′)—, —C(O)S—, —C(O)O—, —P(O)(OR′)—, —P(O)(SR′)—, —P(O)(R′)—, —P(O)(NR′)—, —P(S)(OR′)—, —P(S)(SR′)—, —P(S)(R′)—, —P(S)(NR′)—, —P(R′)—, —P(OR′)—, —P(SR′)—, —P(NR′)—, —P(OR′)[B(R′)₃]—, —OP(O)(OR′)O—, —OP(O)(SR′)O—, —OP(O)(R′)O—, —OP(O)(NR′)O—, —OP(OR′)O—, —OP(SR′)O—, —OP(NR′)O—, —OP(R′)O—, or —OP(OR′)[B(R′)₃]O—; and one or more carbon atoms are independently replaced with a tetravalent GalNac moiety, or a tetravalent moiety of a GalNac derivative.

[1151] In some embodiments, R^{CD} is optionally substituted

[chemical structure]

In some embodiments, R′ is —C(O)R. In some embodiments, R^{CD} is a monosaccharide moiety. In some embodiments, R^{CD} is a monovalent GalNac moiety. In some embodiments, R^{CD} is

[chemical structure]

In some embodiments, R^{CD} is optionally substituted

[chemical structure]

In some embodiments, R^{CD} is optionally substituted

[chemical structure]

In some embodiments, R′ is —C(O)R. In some embodiments, R^{CD} is optionally substituted

[chemical structure]

In some embodiments, R^{CD} is a disaccharide moiety. In some embodiments, R^{CD} is a polysaccharide moiety.

[1152] In some embodiments, R^{CD} has the structure of R^{G}-L-, wherein R^{G} is —H, or an optionally substituted group selected from C₃-C₂₀ cycloaliphatic, and 3-20 membered heterocyclyl having 1-10 heteroatoms independently selected from oxygen, nitrogen, sulfur, phosphorus, boron and silicon. In some embodiments, R^{CD} has the structure of R^{G}-L-, wherein R^{G} is an optionally substituted group selected from C₃-C₂₀ cycloaliphatic, and 3-20 membered heterocyclyl having 1-10 heteroatoms independently selected from oxygen, nitrogen, sulfur, phosphorus, boron and silicon. In some embodiments, R^{CD} has the structure of R^{G}-L-, wherein R^{G} is an optionally substituted group selected from C₃-C₂₀ cycloaliphatic, and 3-20 membered heterocyclyl having 1-10 heteroatoms independently selected from oxygen, nitrogen, sulfur, phosphorus, boron and silicon, wherein at least one heteroatom is oxygen. In some embodiments, R^{G} is substituted, and at least one substitute of each R^{G} is bonded to R^{G} through an oxygen atom. In some embodiments, R^{G} is substituted, and at least one substitute of each R^{G} is bonded to R^{G} through a nitrogen atom. In some embodiments, R^{G} is independently substituted, and each carbon atom of each R^{G} is independently bonded to a substituent through an oxygen or nitrogen atom. In some embodiments, R^{G} is independently substituted, and each carbon atom of each R^{G} is independently bonded to a substituent through an oxygen or nitrogen atom. In some embodiments, R^{G} is optionally substituted 3-20 membered heterocyclyl having 1-10 oxygen atoms. In some embodiments, R^{G} is optionally substituted 3-6 membered heterocyclyl having one oxygen atom. In some embodiments, each R^{G} is independently optionally substituted 3-20 membered heterocyclyl having 1-10 oxygen atoms. In some embodiments, R^{G} is independently optionally substituted 3-6 membered heterocyclyl having one oxygen atom. In some embodiments, each carbon of the heterocyclyl ring of R^{G} is independently boned to an oxygen or nitrogen atom. In some embodiments, two or more carbon atoms of the heterocyclyl ring of R^{G} are independently boned to an oxygen or nitrogen atom. In some embodiments, two or more carbon atoms of the heterocyclyl ring of R^{G} are independently boned to an oxygen or nitrogen atom. In some embodiments, three or more carbon atoms of the heterocyclyl ring of R^{G} are independently boned to an oxygen or nitrogen atom. In some embodiments, four or more carbon atoms of the heterocyclyl ring of R^{G} are independently boned to an oxygen or nitrogen atom. In some embodiments, five or more carbon atoms of the heterocyclyl ring of R^{G} are independently boned to an oxygen or nitrogen atom. In some embodiments, two or more carbon atoms of the heterocyclyl ring of R^{G} are independently boned to an oxygen atom. In some embodiments, three or more carbon atoms of the heterocyclyl ring of R^{G} are independently boned to an oxygen atom. In some embodiments, four or more carbon atoms of the heterocyclyl ring of R^{G} are independently boned to an oxygen atom. In some embodiments, five or more carbon atoms of the heterocyclyl ring of R^{G} are independently boned to an oxygen atom. In some embodiments, R^{G}—H is C₃₋₂₀ polyol comprising a —CHO or —C(O)— group.

[1153] In some embodiments, R^{CD} has the structure of R^{G}-L-, wherein R^{G} is —H, or a substituted group selected from C₃-C₂₀ cycloaliphatic, and 3-20 membered heterocyclyl having 1-10 heteroatoms independently selected from oxygen, nitrogen, sulfur, phosphorus, boron and silicon, wherein 1-20 of the substituents are R groups. In some embodiments, R^{CD} has the structure of R^{G}-L-, wherein R^{G} is —H, or a substituted group selected from C₃-C₂₀ cycloaliphatic, and 3-20 membered heterocyclyl having 1-10 heteroatoms independently selected from oxygen, nitrogen, sulfur, phosphorus, boron and silicon, wherein 1-20 of the substituents are —OR or —N(R)₂ groups. In some embodiments, R^{CD} has the structure of R^{G}-L-, wherein R^{G} is —H, or a substituted group selected from C₃-C₂₀ cycloaliphatic, and 3-20 membered heterocyclyl having 1-10 heteroatoms independently selected from oxygen, nitrogen, sulfur, phosphorus, boron and silicon, wherein 1-20 of the substituents are —OH and —N(R)₂. In some embodiments, R^{CD} has the structure of R^{G}-L-, wherein R^{G} is —H, or a substituted group selected from C₃-C₂₀ cycloaliphatic, and 3-20 membered heterocyclyl having 1-10 heteroatoms independently selected from oxygen, nitrogen, sulfur, phosphorus, boron and silicon, wherein 1-20 of the substituents are —OH and —NHR. In some embodiments, R^{CD} has the structure of R^{G}-L-, wherein R^{G} is —H, or a substituted group selected from C₃-C₂₀ cycloaliphatic, and 3-20 membered heterocyclyl having 1-10 heteroatoms independently selected from oxygen, nitrogen, sulfur, phosphorus, boron and silicon, wherein 1-20 of the substituents are —OH and —NHC(O)R.

[1154] In some embodiments, R^{G} is substituted 3-20 membered heterocyclyl having 1-10 heteroatoms independently selected from oxygen, nitrogen, sulfur, phosphorus, boron and silicon. In some embodiments, R^{G} is substituted 3-20 membered heterocyclyl having 1-10 heteroatoms independently selected from oxygen and nitrogen. In some embodiments, R^{G} is substituted 3-20 membered heterocyclyl having 1-10 oxygen. In some embodiments, R^{G} is substituted

[chemical structure]

In some embodiments, R^{G} is substituted

[chemical structure]

In some embodiments, R^{G} is substituted

[chemical structure]

[1155] In some embodiments, R^{G} is

[chemical structure]

wherein each variable is independently as described in the present disclosure. In some embodiments, t is 1, 2, 3, 4, 5, 6, 7, 8, 9, or 10. In some embodiments, t is at least 1, 2, 3, 4, 5, 6, 7, 8, 9, or 10. In some embodiments, t is at least 1. In some embodiments, t is at least 2. In some embodiments, t is at least 3. In some embodiments, t is at least 4. In some embodiments, t is at least 5. In some embodiments, t is at least 6. In some embodiments, each R^{1s} is independently —OR′ or —N(R′)₂. In some embodiments, each R′ is independently —C(O)R. In some embodiments, each R^{1a} is independently —OR′ or —NHR′. In some embodiments, each R^{1s} is independently —OH or —NHR′. In some embodiments, each R^{1s} is independently —OH or —NHC(O)R. In some embodiments, Ring A is optionally substituted

[chemical structure]

In some embodiments, Ring A is optionally substituted

[chemical structure]

In some embodiments, Ring A is optionally substituted

[chemical structure]

[1156] In some embodiments, R^{G} is

[chemical structure]

wherein each variable is independently as described in the present disclosure (i.e., R^{G}—H is

[chemical structure]

In some embodiments, at least 1, 2, 3, 4, 5, or 6 of R^{1s}, R^{2s}, R^{3s}, R^{4s} and R^{5s} are independently —OR′ or —N(R′)₂. In some embodiments, at least 1, 2, 3, 4, 5, or 6 of R^{1s}, R^{2s}, R^{3s}, R^{4s} and R^{5s} are independently —OR′ or —NHR′. In some embodiments, at least 1, 2, 3, 4, 5, or 6 of R^{1s}, R^{2s}, R^{3s}, R^{4s} and R^{5s} are independently —OH or —NHR′. In some embodiments, at least 1, 2, 3, 4, 5, or 6 of R^{1s}, R^{2s}, R^{3s}, R^{4s} and R^{5s} are independently —OH or —NHC(O)R. In some embodiments, at least 1, 2, 3, 4, 5, or 6 of R^{1s}, R^{2s}, R^{3s}, R^{4s} and R^{5s} are —OH.

[1157] In some embodiments, each ring carbon atom of the cycloaliphatic or heterocyclic ring of R^{G} is independently substituted. In some embodiments, no more than 1, 2, 3, 4, 5, 6, 7, 8, 9, or 10 ring carbon atoms of the cycloaliphatic or heterocyclic ring of R^{G} are not substituted. In some embodiments, no more than 1 ring carbon atom is not substituted. In some embodiments, no more than 2 ring carbon atoms are not substituted. In some embodiments, no more than 3 ring carbon atoms are not substituted. In some embodiments, no more than 4 ring carbon atoms are not substituted. In some embodiments, no more than 5 ring carbon atoms are not substituted. In some embodiments, no more than 6 ring carbon atoms are not substituted. In some embodiments, no more than 7 ring carbon atoms are not substituted. In some embodiments, no more than 8 ring carbon atoms are not substituted. In some embodiments, no more than 9 ring carbon atoms are not substituted. In some embodiments, no more than 10 ring carbon atoms are not substituted. In some embodiments, no more than 1, 2, 3, 4, 5, 6, 7, 8, 9, or 10 ring carbon atoms of the cycloaliphatic or heterocyclic ring of R^{G} are not substituted with —OH or —N(R′)₂. In some embodiments, no more than 1 ring carbon atom is not substituted with —OH or —N(R′)₂. In some embodiments, no more than 2 ring carbon atoms are not substituted with —OH or —N(R′)₂. In some embodiments, no more than 3 ring carbon atoms are not substituted with —OH or —N(R′)₂. In some embodiments, no more than 4 ring carbon atoms are not substituted with —OH or —N(R′)₂. In some embodiments, no more than 5 ring carbon atoms are not substituted with —OH or —N(R′)₂. In some embodiments, no more than 6 ring carbon atoms are not substituted with —OH or —N(R′)₂. In some embodiments, no more than 7 ring carbon atoms are not substituted with —OH or —N(R′)₂. In some embodiments, no more than 8 ring carbon atoms are not substituted with —OH or —N(R′)₂. In some embodiments, no more than 9 ring carbon atoms are not substituted with —OH or —N(R′)₂. In some embodiments, no more than 10 ring carbon atoms are not substituted with —OH or —N(R′)₂. In some embodiments, no more than 1, 2, 3, 4, 5, 6, 7, 8, 9, or 10 ring carbon atoms of the cycloaliphatic or heterocyclic ring of R^{G} are not substituted with —OH. In some embodiments, no more than 1 ring carbon atom is not substituted with —OH. In some embodiments, no more than 2 ring carbon atoms are not substituted with —OH. In some embodiments, no more than 3 ring carbon atoms are not substituted with —OH. In some embodiments, no more than 4 ring carbon atoms are not substituted with —OH. In some embodiments, no more than 5 ring carbon atoms are not substituted with —OH. In some embodiments, no more than 6 ring carbon atoms are not substituted with —OH. In some embodiments, no more than 7 ring carbon atoms are not substituted with —OH. In some embodiments, no more than 8 ring carbon atoms are not substituted with —OH. In some embodiments, no more than 9 ring carbon atoms are not substituted with —OH. In some embodiments, no more than 10 ring carbon atoms are not substituted with —OH. In some embodiments, at least 10%, 20%, 30%, 40%, 50%, 60%, 70%, 80%, 90%, or 95% percent of the ring carbon atoms of the cycloaliphatic or heterocyclic ring of R^{G} are substituted with —OH or —N(R′)₂. In some embodiments, no more than 10%, 20%, 30%, 40%, 50%, 60%, 70%, 80%, 90%, or 95% of the ring carbon atoms of the cycloaliphatic or heterocyclic ring of R^{G} are not substituted with —OH. In some embodiments, no more than 10% of the ring carbon atoms are not substituted with —OH. In some embodiments, no more than 20% of the ring carbon atoms are not substituted with —OH. In some embodiments, each ring carbon atom of the cycloaliphatic or heterocyclic ring of R^{G} is independently substituted. In some embodiments, at least 1, 2, 3, 4, 5, 6, 7, 8, 9, or 10 ring carbon atoms of the cycloaliphatic or heterocyclic ring of R^{G} are substituted. In some embodiments, at least 1 ring carbon atom is substituted. In some embodiments, at least 2 ring carbon atoms are substituted. In some embodiments, at least 3 ring carbon atoms are substituted. In some embodiments, at least 4 ring carbon atoms are substituted. In some embodiments, at least 5 ring carbon atoms are substituted. In some embodiments, at least 6 ring carbon atoms are substituted. In some embodiments, at least 7 ring carbon atoms are substituted. In some embodiments, at least 8 ring carbon atoms are substituted. In some embodiments, at least 9 ring carbon atoms are substituted. In some embodiments, at least 10 ring carbon atoms are substituted. In some embodiments, at least 1, 2, 3, 4, 5, 6, 7, 8, 9, or 10 ring carbon atoms of the cycloaliphatic or heterocyclic ring of R^{G} are substituted with —OH or —N(R′)₂. In some embodiments, at least 1 ring carbon atom is substituted with —OH or —N(R′)₂. In some embodiments, at least 2 ring carbon atoms are substituted with —OH or —N(R′)₂. In some embodiments, at least 3 ring carbon atoms are substituted with —OH or —N(R′)₂. In some embodiments, at least 4 ring carbon atoms are substituted with —OH or —N(R′)₂. In some embodiments, at least 5 ring carbon atoms are substituted with —OH or —N(R′)₂. In some embodiments, at least 6 ring carbon atoms are substituted with —OH or —N(R′)₂. In some embodiments, at least 7 ring carbon atoms are substituted with —OH or —N(R′)₂. In some embodiments, at least 8 ring carbon atoms are substituted with —OH or —N(R′)₂. In some embodiments, at least 9 ring carbon atoms are substituted with —OH or —N(R′)₂. In some embodiments, at least 10 ring carbon atoms are substituted with —OH or —N(R′)₂. In some embodiments, at least 1, 2, 3, 4, 5, 6, 7, 8, 9, or 10 ring carbon atoms of the cycloaliphatic or heterocyclic ring of R^{G} are substituted with —OH. In some embodiments, at least 1 ring carbon atom is substituted with —OH. In some embodiments, at least 2 ring carbon atoms are substituted with —OH. In some embodiments, at least 3 ring carbon atoms are substituted with —OH. In some embodiments, at least 4 ring carbon atoms are substituted with —OH. In some embodiments, at least 5 ring carbon atoms are substituted with —OH. In some embodiments, at least 6 ring carbon atoms are substituted with —OH. In some embodiments, at least 7 ring carbon atoms are substituted with —OH. In some embodiments, at least 8 ring carbon atoms are substituted with —OH. In some embodiments, at least 9 ring carbon atoms are substituted with —OH. In some embodiments, at least 10 ring carbon atoms are substituted with —OH. In some embodiments, at least 10%, 20%, 30%, 40%, 50%, 60%, 70%, 80%, 90%, or 95% percent of the ring carbon atoms of the cycloaliphatic or heterocyclic ring of R^{G} are substituted with —OH or —N(R′)₂. In some embodiments, at least 10% the ring carbon atoms are substituted with —OH or —N(R′)₂. In some embodiments, at least 20% the ring carbon atoms are substituted with —OH or —N(R′)₂. In some embodiments, at least 30% of the ring carbon atoms are substituted with —OH or —N(R′)₂. In some embodiments, at least 40% of the ring carbon atoms are substituted with —OH or —N(R′)₂. In some embodiments, at least 50% of the ring carbon atoms are substituted with —OH or —N(R′)₂. In some embodiments, at least 60% of the ring carbon atoms are substituted with —OH or —N(R′)₂. In some embodiments, at least 70% of the ring carbon atoms are substituted with —OH or —N(R′)₂. In some embodiments, at least 80% of the ring carbon atoms are substituted with —OH or —N(R′)₂. In some embodiments, at least 90% of the ring carbon atoms are substituted with —OH or —N(R′)₂. In some embodiments, at least 95% of the ring carbon atoms are substituted with —OH or —N(R′)₂. In some embodiments, at least 10%, 20%, 30%, 40%, 50%, 60%, 70%, 80%, 90%, or 95% of the ring carbon atoms of the cycloaliphatic or heterocyclic ring of R^{G} are substituted with —OH. In some embodiments, at least 10% of the ring carbon atoms are substituted with —OH. In some embodiments, at least 20% of the ring carbon atoms are substituted with —OH. In some embodiments, at least 30% of the ring carbon atoms are substituted with —OH. In some embodiments, at least 40% of the ring carbon atoms are substituted with —OH. In some embodiments, at least 50% of the ring carbon atoms are substituted with —OH. In some embodiments, at least 60% of the ring carbon atoms are substituted with —OH. In some embodiments, at least 70% of the ring carbon atoms are substituted with —OH. In some embodiments, at least 80% of the ring carbon atoms are substituted with —OH. In some embodiments, at least 90% of the ring carbon atoms are substituted with —OH. In some embodiments, at least 95% of the ring carbon atoms are substituted with —OH. In some embodiments, at least one ring carbon atom is substituted with —N(R′)₂. In some embodiments, at least one ring carbon atom is substituted with —NHC(O)R. In some embodiments, at least one ring carbon atom is substituted with —NHC(O)R, wherein R is optionally substituted C₁₋₆ aliphatic. In some embodiments, at least one ring carbon atom is substituted with —NHAc.

[1158] In some embodiments, R^{G} is optionally substituted

[chemical structure]

In some embodiments, R′ is —C(O)R. In some embodiments, R^{G} is

[chemical structure]

In some embodiments, R^{G} is optionally substituted

[chemical structure]

[1159] In some embodiments, R^{G} is optionally substituted

[chemical structure]

In some embodiments, R′ is —C(O)R. In some embodiments, R^{G} is optionally substituted

[chemical structure]

[1160] In some embodiments, R^{CD}, or R^{G}, is of such a structure that R^{CD}—H, or R^{G}—H, is

[chemical structure]

[chemical structure]

In some embodiments, R^{CD}, or R^{G}, is of such a structure that R^{CD}—H, or R^{G}—H, is a ligand for the asialoglycoprotein receptor (ASGPR). Various other ASGPR ligands are known in the art and can be utilized in accordance with the present disclose. In some embodiments, carbohydrate moieties described in are useful for targeted delivery of provided oligonucleotides to liver.

[1161] In some embodiments, L is a covalent bond. In some embodiments, L is bivalent optionally substituted C₁₋₆ aliphatic wherein one or more methylene units are independently and optionally replaced with —O—. In some embodiments, L is —O—CH₂—.

[1162] In some embodiments, R^{CD} is an oligomeric or polymeric moiety of R^{G}—H, wherein each R^{G} is independently as described in the present disclosure.

[1163] In some embodiments, an APOC3 oligonucleotide or single-stranded RNAi agent comprises any targeting moiety described herein or known in the art. In some embodiments, an APOC3 oligonucleotide is a single-stranded RNAi agent.

[1164] In some embodiments, a targeting moiety is a ligand for the asialoglycoprotein receptor (ASGPR).

[1165] In some embodiments, a targeting moiety is a ligand for the asialoglycoprotein receptor (ASGPR) disclosed in: Sanhueza et al. J. Am. Chem. Soc., 2017, 139 (9), pp 3528-3536.

[1166] In some embodiments, a targeting moiety is a ligand for the asialoglycoprotein receptor (ASGPR) disclosed in Liras et al. US 20160207953.

[1167] In some embodiments, a targeting moiety is a substituted-6,8-dioxabicyclo[3.2.1]octane-2,3-diol derivative disclosed in Liras et al. US 20160207953.

[1168] In some embodiments, a targeting moiety is a ligand for the asialoglycoprotein receptor (ASGPR) disclosed in Liras et al. US 20150329555.

[1169] In some embodiments, a targeting moiety is a substituted-6,8-dioxabicyclo[3.2.1]octane-2,3-diol derivative disclosed in Liras et al. US 20150329555.

[1170] In some embodiments, an additional chemical moiety conjugated to an APOC3 oligonucleotide or single-stranded RNAi agent is a GalNAc moiety. In some embodiments, an additional chemical moiety conjugated to an APOC3 oligonucleotide or single-stranded RNAi agent is a GalNAc moiety which is conjugated at any position.

[1171] In some embodiments, an additional chemical moiety conjugated to an APOC3 oligonucleotide or single-stranded RNAi agent is a GalNAc moiety, conjugated via a linker to a 5′-H T. In some embodiments, an additional chemical moiety conjugated to an APOC3 oligonucleotide or single-stranded RNAi agent is a GalNAc moiety, conjugated via a linker to a 5′-H T which is conjugated at any position.

[1172] In some embodiments, an additional chemical moiety is GaNC6T (also known as TGaNC6T, or conjugation of a GalNAc moiety to 5′H T via amino C6 linker) at any position.

[1173] In some embodiments, an additional chemical moiety is GaNC6T, e.g., conjugation of a GalNAc moiety to 5′H T via amino C6 linker (e.g., at the penultimate or antepenultimate nucleotide [counting 5′ to 3′]; for example, the 5′ nucleotide of the 3′-terminal dinucleotide (e.g., the 5′ nucleotide of the 3′-terminal dinucleotide is, of the two nucleotides of the 3′-terminal dinucleotide, the nucleotide closer to the 5′-end of the oligonucleotide) or the nucleotide immediately 5′ to the 5′ nucleotide of the 3′-terminal dinucleotide:

[chemical structure]

[1174] In some embodiments or single-stranded RNAi agent, the oligonucleotide or single-stranded RNAi agent comprises a linker conjugating a GalNAc moiety to the oligonucleotide or single-stranded RNAi agent. In some embodiments or single-stranded RNAi agent, the oligonucleotide or single-stranded RNAi agent comprises a linker conjugating a GalNAc moiety to the oligonucleotide or single-stranded RNAi agent, wherein the linker is attached at the 2′ position of a sugar. In some embodiments or single-stranded RNAi agent, the oligonucleotide or single-stranded RNAi agent comprises a linker conjugating a GalNAc moiety to the oligonucleotide or single-stranded RNAi agent, wherein the linker is attached to a base. In some embodiments or single-stranded RNAi agent, the oligonucleotide or single-stranded RNAi agent comprises a linker conjugating a GalNAc moiety to the oligonucleotide or single-stranded RNAi agent, wherein the linker is attached to a T base. In some embodiments or single-stranded RNAi agent, the oligonucleotide or single-stranded RNAi agent comprises a linker conjugating a GalNAc moiety to the oligonucleotide or single-stranded RNAi agent.

[1175] In some embodiments, a linker attaching a GalNAc moiety is a biocleavable linker. Such a linker allows the intracellular removal of the GalNAc moiety, so that the GalNAc moiety will not interfere with Ago-2 activity or RNA interference.

[1176] In some embodiments, a GalNAc moiety is conjugated to an APOC3 oligonucleotide or single-stranded RNAi agent at the penultimate or antepenultimate nucleotide.

[1177] In some embodiments, a GalNAc moiety can be conjugated at the penultimate nucleotide of a single-stranded RNAi agent (the more 5′ position of a 3′-terminal dinucleotide), or at the antepenultimate nucleotide of a single-stranded RNAi agent (the nucleotide immediate 5′ to the 3′-terminal dinucleotide). Without wishing to be bound by any particular theory, this disclosure suggests that the penultimate or antepenultimate nucleotide of a single-stranded RNAi agent (e.g., the more 5′ position of a 3′-terminal dinucleotide) can be adjacent to a pocket in Ago-2, and a GalNAc moiety may be capable of insertion into said pocket, such that the GalNAc moiety does not interfere with Ago-2 activity. Without wishing to be bound by any particular theory, this disclosure suggests that if a GalNAc moiety is attached at the penultimate or antepenultimate nucleotide, it may thus not be necessary to cleave the GalNAc moiety to allow RNAi activity, and it may thus be acceptable to use a more robust, non-biocleavable linker to attach a GalNAc moiety to the oligonucleotide or single-stranded RNAi agent. The more robust linker thus is less susceptible to cleavage, increasing the probability that a GalNAc moiety will increase delivery of the oligonucleotide or single-stranded RNAi agent.

[1178] In some embodiments, the GalNAc moiety is attached via a AMC6 linker.

[1179] In some embodiments, the GalNAc moiety is attached via a AMC6 linker attached at a T base (AMC6T).

[1180] In some embodiments, AMC6T has a structure of:

[chemical structure]

In some non-limiting examples, AMC6T is either the penultimate or antepenultimate nucleotide [counting 5′ to 3′]; for example, the 5′ nucleotide of the 3′-terminal dinucleotide, or the nucleotide immediately 5′ to the 5′ nucleotide of the 3′-terminal dinucleotide.

[1181] In some embodiments of a single-stranded RNAi agent, the single-stranded RNAi agent comprises a AMC6T at the penultimate or antepenultimate nucleotide.

[1182] As disclosed herein, GaNC6T is a component in an efficacious single-stranded RNAi agent. In some non-limiting examples, GaNC6T is either at the penultimate or antepenultimate nucleotide [counting 5′ to 3′]; for example, the 5′ nucleotide of the 3′-terminal dinucleotide, or the nucleotide immediately 5′ to the 5′ nucleotide of the 3′-terminal dinucleotide. In some non-limiting examples disclosed herein, GaNC6T is at nucleotide position 20 out of 21 (counting from the 5′-end), or 24 out of 25 (counting from the 5′-end).

[1183] In some embodiments, an APOC3 oligonucleotide or single-stranded RNAi agent is conjugated to Tri-antennary GalNAc Acid (e.g., via a C10, C3 or triazine linker):

[chemical structure]

These structures represent the protected versions, as they comprise —OAc (—O-acetate groups). In some embodiments, the Ac groups are removed during de-protection following conjugation of the compound to the oligonucleotide. In some embodiments, de-protection is performed with concentrated ammonium hydroxide, e.g., as described in Example 37B. In the de-protected versions of these structures, —OAc is replaced by —OH.

[1184] In some embodiments, a GalNAc moiety is conjugated at the 5′-end. Each of these additional chemical moieties (Tri-antennary GalNAc Acid, with each of the C12, C5 or triazine linkers) was conjugated to an APOC3 oligonucleotide targeting Factor XI (FXI), which operates via a RNase H mechanism.

[1185] Several oligonucleotides were constructed; each comprises an APOC3 oligonucleotide targeting Factor XI (FXI), which operates via a RNase H mechanism, with each conjugated to a different Tri-antennary GalNAc Acid, with each of the C12, C5 or triazine linkers. The Tri-antennary GalNAc Acid has been revealed experimentally (data not shown) to improve the delivery of the oligonucleotides to the liver.

[1186] In some embodiments, the present disclosure pertains to any oligonucleotide conjugated to Tri-antennary GalNAc Acid. In some embodiments, the present disclosure pertains to any oligonucleotide conjugated to Tri-antennary GalNAc Acid via a C10, C3 or triazine linker. In some embodiments, the present disclosure pertains to any oligonucleotide conjugated to Tri-antennary GalNAc Acid, wherein the oligonucleotide directs knockdown of a target transcript mediated by a RNase H or RNA interference mechanism. In some embodiments, the present disclosure pertains to any oligonucleotide conjugated to Tri-antennary GalNAc Acid via a C10, C3 or triazine linker, wherein the oligonucleotide directs knockdown of a target transcript mediated by a RNase H or RNA interference mechanism.

[1187] In some embodiments, the present disclosure pertains to any oligonucleotide conjugated to Tri-antennary GalNAc Acid, wherein the oligonucleotide directs knockdown of a target transcript mediated by a RNase H or RNA interference mechanism, wherein the RNA interference mechanism is directed by a RNAi agent comprising 1, 2 or more strands. In some embodiments, the present disclosure pertains to any oligonucleotide conjugated to Tri-antennary GalNAc Acid via a C10, C3 or triazine linker, wherein the oligonucleotide directs knockdown of a target transcript mediated by a RNase H or RNA interference mechanism, wherein the RNA interference mechanism is directed by a RNAi agent comprising 1, 2 or more strands.

[1188] In addition, the present disclosure shows that in provided oligonucleotides capable of directing single-stranded RNA interference it is not necessary for the first nucleotide on the 5′-end of a single-stranded RNAi agent to match the corresponding portion of the sequence of the target transcript.

[1189] Oligonucleotides capable of directing single-stranded RNA interference were prepared and characterized using a variety of methods in accordance of the present disclosure. In some embodiments, a provided oligonucleotide composition is a single-stranded RNAi agent of an APOC3 oligonucleotide type listed in Table 1A. In some embodiments, a provided oligonucleotide composition is a single-stranded RNAi agent of an APOC3 oligonucleotide type listed as any of Formats illustrated in FIG. 1.

[1190] In some embodiments, an APOC3 oligonucleotide is capable of directing knockdown of a target transcript by both RNase H-mediated knockdown and RNA interference. Such an APOC3 oligonucleotide is described herein a dual mechanism or hybrid oligonucleotide.

[1191] In some embodiments, an APOC3 oligonucleotide, an APOC3 oligonucleotide that directs RNA interference, an APOC3 oligonucleotide that directs RNase H-mediated knockdown, or an APOC3 oligonucleotide that directs both RNA interference and RNase H-mediated knockdown can comprise any additional chemical moiety, including but not limited to, any GalNAc moiety described or referenced in any of: U.S. Pat. Nos. 5,382,524; 5,491,075; 5,545,553; 5,705,367; 5,733,765; 5,786,184; 5,798,233; 5,854,042; 5,871,990; 5,945,322; 6,165,469; 6,187,310; 6,342,382; 6,465,220; 6,503,744; 6,699,705; 6,723,545; 6,780,624; 6,825,019; 6,905,867; 6,911,337; 7,026,147; 7,078,207; 7,138,258; 7,166,717; 7,169,593; 7,169,914; 7,189,836; 7,192,756; 7,202,353; 7,208,304; 7,211,657; 7,217,549; 7,220,848; 7,238,509; 7,338,932; 7,371,838; 7,384,771; 7,462,474; 7,598,068; 7,608,442; 7,682,787; 7,723,092; 8,039,218; 8,137,941; 8,268,596; 8,871,723; or 9,222,080.

[1192] Dual Mechanism or Hybrid Oligonucleotide

[1193] In some embodiments, an APOC3 oligonucleotide or an APOC3 oligonucleotide that directs both RNA interference and RNase H-mediated knockdown can comprise structural element of any oligonucleotide described herein or known in the art.

[1194] As disclosed herein, some oligonucleotides are capable of directing knockdown of a transcript target by both RNase H-mediated knockdown and RNA interference.

[1195] As disclosed herein, some oligonucleotides (including but not limited to those described herein as dual mechanism or hybrid oligonucleotides or hybrid RNAi agents) are capable of directing knockdown of a transcript target by both RNase H-mediated knockdown and RNA interference.

[1196] Wishing wishing to be bound by any particular theory, the present disclosure suggests that a hybrid oligonucleotide can have particular advantages to either an APOC3 oligonucleotide capable of directing knockdown solely by RNase H-mediated knockdown, or an APOC3 oligonucleotide capable of directing knockdown solely by RNA interference. For example, if several hybrid oligonucleotides are introduced into the same cell, some but not all hybrid oligonucleotide may participate in the RISC pathway; those which do not are available to participate in the RNase H-mediated pathway. For example, if several hybrid oligonucleotides are introduced into the same cell, some but not all hybrid oligonucleotide may participate in the RNase H-mediated pathway; those which do not are available to participate in the RISC pathway. Without wishing to be bound by any particular theory, the present disclosure suggests that a hybrid oligonucleotide may be able to mediate more efficacious knockdown than an APOC3 oligonucleotide capable of directing knockdown solely by RNase H-mediated knockdown, or an APOC3 oligonucleotide capable of directing knockdown solely by RNA interference, as the hybrid oligonucleotide is capable of directing knockdown via both pathways. In at least some cells, levels of RNase H activity and RNA interference may differ from cell compartment to cell compartment. In some embodiments, a hybrid oligonucleotide can direct knockdown in various cell compartments via RNase H-mediated knockdown or RNA interference. In some embodiments, if RNase H is saturated with oligonucleotides, the excess oligonucleotides can be available for RNA interference-mediated knockdown. In some embodiments, if Ago-2 is saturated with oligonucleotides, the excess oligonucleotides can be available for RNase H-mediated knockdown.

[1197] In some embodiments, a hybrid oligonucleotide comprises a structure which allows both knockdown via RNase H-mediated knockdown and knockdown via RNA interference.

[1198] Reportedly, RNase H and RNAi both involve knockdown of a target mRNA, but they involve different mechanisms. Reportedly, RNase H naturally involves a single-stranded DNA molecule which binds to a mRNA target and decreases expression by either sterically hindering translation, or by the RNA/DNA duplex acting as a substrate for RNase H, which cleaves the mRNA target.

[1199] In contrast, reportedly, RNAi naturally involves a double-stranded RNA molecule, naturally produced by Dicer with two 3′ overhangs, including an antisense and a sense strand. The strands are separated as the duplex is unwound and the antisense incorporated into the RISC (RNA interference silencing complex), including Argonaute-2. The antisense strand acts as a guide for RISC to identity the complementary mRNA target and cleave it. As shown herein, certain formats of single-stranded RNAi agents are also efficacious, although single-stranded RNAi agents are not naturally produced by Dicer.

[1200] Reportedly, RNase H and RISC naturally prefer two structurally distinct types of molecules. RNase H naturally uses a single-stranded DNA molecule to target the mRNA target, forming a DNA/RNA duplex. Reportedly, RISC reportedly naturally uses a single-stranded RNA antisense strand to target the mRNA target, forming a RNA/RNA duplex. Crooke et al. 1995 Biochem. J. 312: 599-608; and Elbashir et al. Nature 2001 411: 494.

[1201] Crooke et al. 1995 Biochem. J. 312: 599-608 also reported that E. coli RNase H1 had been crystallized and studied, and that the preferred substrate was reportedly a RNA/DNA duplex. In the DNA strand, 2′-modifications such as 2′-OMe and 2′-F reportedly reduced or eliminated RNase H activity. In addition, for RNA interference, full replacement of RNA by DNA reportedly abolishes RNA interference activity of double-stranded RNAi agents. Elbashir et al. 2001 EMBO J. 20: 6877-6888. Thus, reportedly, RNase H-mediated knockdown reportedly requires a span of DNA (2′-deoxy), while RNA interference can be abolished by replacement of a span of nucleotides with DNA (2′-deoxy).

[1202] In contrast, as shown herein, 2′-OMe and 2′-F modifications are highly suitable for single-stranded RNAi agents. The Applicants thus designed and constructed several oligonucleotides which comprise (a) a seed region comprising 2′-modified nucleotides; and (b) a post-seed region comprising a stretch of 2′-deoxy (2′-deoxy) nucleotides. These are shown herein to function via both the RNAi and RNase H-mediated knockdown mechanisms.

[1203] In some embodiments, a hybrid oligonucleotide comprises a (a) seed region capable of annealing to a first complementary target mRNA region and mediating RNA interference; and (b) a post-seed region comprising a 2′-deoxy (2′-deoxy) region capable of annealing a second complementary target mRNA region and directing RNase H-mediated knockdown. The seed region can optionally comprise RNA or a modified nucleotide, e.g., with a 2′ modification (including but not limited to 2′-F, 2′-OMe and 2′-MOE), wherein the RNA or modified nucleotide comprise a natural sugar and/or a natural base, and/or a modified base, and/or an internucleotidic linkage.

[1204] A minimum length for a DNA (2′-deoxy) region efficacious for RNase H-mediated knockdown, in at least some cases, is reported to be about 5 consecutive DNA (2′-deoxy); this minimum deoxy length reportedly correlated with the minimum length required for efficient RNase H activation in vitro using partially purified mammalian RNase H enzyme. Monia et al. 1993 JBC 268: 14514-14522.

[1205] In some embodiments, a hybrid oligonucleotide comprises a (a) seed region capable of annealing to a first complementary target mRNA region; and (b) a post-seed region comprising a 2′-deoxy region, wherein the hybrid oligonucleotide is capable of directing both RNA interference and RNase H-mediated knockdown, wherein the 2′-deoxy region comprises at least 5 consecutive 2′-deoxy. In some embodiments, the 2′-deoxy can be DNA, or a modified nucleotide, e.g., a modified nucleotide with a 2′-deoxy, wherein the DNA or modified nucleotide comprise a natural sugar and/or a natural base, and/or a modified base, and/or any internucleotidic linkage. In some embodiments, the 2′-deoxy region comprises a stretch of consecutive nucleotides, wherein each nucleotide is 2′-deoxy and each internucleotidic linkage is a phosphorothioate. In some embodiments, the 2′-deoxy region comprises a stretch of consecutive nucleotides of at least 5, 6, 7, 8, 9, 10, 11, 12, 13, 14, 15, 16, 17, 18, 19, 20 or 21 nucleotides, wherein each nucleotide is 2′-deoxy and each internucleotidic linkage is a phosphorothioate.

[1206] In some embodiments, a hybrid oligonucleotide comprises a (a) seed region capable of annealing to a first complementary target mRNA region; and (b) a post-seed region comprising a 2′-deoxy region, wherein the hybrid oligonucleotide is capable of directing both RNA interference and RNase H-mediated knockdown, wherein the 2′-deoxy region comprises at least 5 consecutive 2′-deoxy. In some embodiments, the 2′-deoxy can be DNA, or a modified nucleotide, e.g., a modified nucleotide with a 2′-deoxy, wherein the DNA or modified nucleotide comprise a natural sugar and/or a natural base, and/or a modified base, and/or any internucleotidic linkage. In some embodiments, the 2′-deoxy region comprises or is a span of consecutive nucleotides, wherein each nucleotide is 2′-deoxy and each internucleotidic linkage is a phosphorothioate. In some embodiments, the 2′-deoxy region comprises or is a stretch of consecutive nucleotides, wherein each nucleotide is 2′-deoxy and each internucleotidic linkage is a phosphorothioate. In some embodiments, the 2′-deoxy region comprises a stretch of consecutive nucleotides of at least 5, 6, 7, 8, 9, 10, 11, 12, 13, 14, 15, 16, 17, 18, 19, 20 or 21 nucleotides, wherein each nucleotide is 2′-deoxy and each internucleotidic linkage is a phosphorothioate.

[1207] Without wishing to be bound by any particular theory, the present disclosure notes that WO 2015/107 425 has reported that cleavage mediated by RNase H can be modulated by the arrangement of chiral centers in phosphorothioates in an antisense oligonucleotide directing RNase H cleavage. For example, the placement of a single Rp flanked by at least 2 or 3 Sp can alter the cleavage pattern, such that the number of cleavage sites is reduced and the site of RNase H-mediated cleavage is controlled.

[1208] In some embodiments, a hybrid oligonucleotide comprises a (a) seed region capable of annealing to a first complementary target mRNA region; and (b) a post-seed region comprising a 2′-deoxy region, wherein the hybrid oligonucleotide is capable of directing both RNA interference and RNase H-mediated knockdown, wherein the 2′-deoxy region comprises a stretch of consecutive nucleotides of at least 5, 6, 7, 8, 9, 10, 11, 12, 13, 14, 15, 16, 17, 18, 19, 20 or 21 nucleotides, wherein each nucleotide is 2′-deoxy and each internucleotidic linkage is a phosphorothioate.

[1209] In some embodiments, a hybrid oligonucleotide comprises a (a) seed region capable of annealing to a first complementary target mRNA region; and (b) a post-seed region comprising a 2′-deoxy region, wherein the hybrid oligonucleotide is capable of directing both RNA interference and RNase H-mediated knockdown, wherein the 2′-deoxy region comprises a stretch of consecutive nucleotides of at least 9 nucleotides, wherein each nucleotide is 2′-deoxy and each internucleotidic linkage is a phosphorothioate.

[1210] In some embodiments, the first and second complementary target mRNA regions are regions of the same target mRNA.

[1211] In some embodiments, the first and second complementary target mRNA regions are regions of different target mRNAs.

[1212] In some embodiments of a hybrid oligonucleotide, a seed region comprises a DNA region capable of annealing to a complementary target mRNA region and directing RNase H-mediated knockdown.

[1213] Without wishing to be bound by any particular theory, the present disclosure notes that, in many cases, RNase H cleaves a single-stranded RNA target which is bound to a single-stranded DNA. In some embodiments, a hybrid oligonucleotide comprises a single-stranded 2′-deoxy portion, which is capable of binding to a target RNA transcript, forming a substrate for RNase H. In some embodiments, a hybrid oligonucleotide comprises a single-stranded 2′-deoxy portion (which comprises internucleotidic linkages which can be any internucleotidic linkage described herein or known in the art), which is capable of binding to a target RNA transcript, forming a substrate for RNase H.

[1214] In some embodiments of a single-stranded RNAi agent, a post-seed region comprises: a sequence of nucleotides comprising at least 4 consecutive 2′-deoxy. In some embodiments of a single-stranded RNAi agent, a post-seed region comprises: a sequence of nucleotides comprising at least 5 consecutive 2′-deoxy. In some embodiments of a single-stranded RNAi agent, a post-seed region comprises: a sequence of nucleotides comprising at least 6 consecutive 2′-deoxy. In some embodiments of a single-stranded RNAi agent, a post-seed region comprises: a sequence of nucleotides comprising at least 7 consecutive 2′-deoxy. In some embodiments of a single-stranded RNAi agent, a post-seed region comprises: a sequence of nucleotides comprising at least 8 consecutive 2′-deoxy. In some embodiments of a single-stranded RNAi agent, a post-seed region comprises: a sequence of nucleotides comprising at least 9 consecutive 2′-deoxy. In some embodiments of a single-stranded RNAi agent, a post-seed region comprises: a sequence of nucleotides comprising at least 10 to 20 consecutive 2′-deoxy.

[1215] In some embodiments of a hybrid oligonucleotide, a post-seed region comprises: at least 9 consecutive 2′-deoxy. In some embodiments of a single-stranded RNAi agent, a post-seed region comprises: at least 10 consecutive 2′-deoxy. The ability of various single-stranded RNAi agents and antisense oligonucleotides to mediate RNA interference or RNase H knockdown is described herein and shown, as non-limiting examples, in the Figures and Tables.

[1216] Experimental data (not shown) and described in detail elsewhere herein demonstrated that putative dual mechanism oligonucleotides are capable of mediating both RNA interference and RNase H knockdown. RNA interference was tested in either of two different in vitro Ago-2 assays, and RNase H knockdown was tested in an in vitro RNase H assay.

[1217] The experiments used an RNase H assay, with WV-1868 (ASO, mediating a RNase H knockdown mechanism) as a positive control, and WV-2110 (a single-stranded RNAi agent) as a negative control. RNA molecule WV-2372 is used as a test substrate. In the RNase H assay, dual mechanism oligonucleotide WV-2111 mediated RNase H knockdown.

[1218] Allele Specific Suppression

[1219] In some embodiments, provided oligonucleotides are capable of directing a decrease in the expression and/or level of a target gene or its gene product. In some embodiments, provided oligonucleotides are capable of mediating allele-specific suppression (or allele-specific knockdown).

[1220] In some embodiments, in some disease states, a patient (e.g., a human patient) can comprise two copies of the same gene, wherein one copy is wild-type (which is not disease-related), whereas the other copy on another chromosome has a mutation (which is disease-related). In some embodiments, the wild-type and mutant alleles can be differentiated by a particular sequence at the mutation, or else can be differentiated by a sequence outside the deleterious mutation (e.g., at a SNP). Knocking down both the mutant and wild-type alleles can sometimes be undesirable, because expression of the wild-type gene may be necessary or beneficial, while expression of the mutant gene may be deleterious or disease-related.

[1221] Without wishing to be bound by any particular theory, the present disclosure notes that, in many cases, introduction of a stereocontrolled chiral internucleotidic linkage (in place of a stereorandom chiral internucleotidic linkage) can increase the allele-specific suppression, stability, efficacy, specificity, delivery, and/or albumin binding of an APOC3 oligonucleotide.

[1222] In some embodiments, an APOC3 oligonucleotide capable of mediating allele-specific suppression comprises one or more stereopure chiral internucleotidic linkages.

[1223] In some embodiments, an APOC3 oligonucleotide capable of mediating allele-specific suppression comprises one or more stereopure chiral internucleotidic linkages in the Sp configuration.

[1224] In some embodiments, an APOC3 oligonucleotide capable of mediating allele-specific suppression comprises one or more stereopure chiral internucleotidic linkages in the Sp configuration and one or more stereopure chiral internucleotidic linkages in the Rp configuration.

[1225] In some embodiments, an APOC3 oligonucleotide capable of mediating allele-specific suppression comprises one or more stereopure phosphorothioates.

[1226] In some embodiments, an APOC3 oligonucleotide capable of mediating allele-specific suppression comprises one or more stereopure phosphorothioates in the Sp configuration.

[1227] In some embodiments, an APOC3 oligonucleotide capable of mediating allele-specific suppression comprises one or more stereopure phosphorothioates in the Rp configuration.

[1228] In some embodiments, an APOC3 oligonucleotide capable of mediating allele-specific suppression comprises one or more stereopure phosphorothioates in the Sp configuration and one or more stereopure phosphorothioates in the Rp configuration.

[1229] In some embodiments, an APOC3 oligonucleotide capable of allele-specific suppression of a target gene or its gene product can comprise any structure or format described herein.

[1230] Multimers of oligonucleotides

[1231] In some embodiments, a multimer comprises two or more of: an APOC3 oligonucleotide, an APOC3 oligonucleotide that directs RNA interference, an APOC3 oligonucleotide that directs RNase H-mediated knockdown and/or or an APOC3 oligonucleotide that directs both RNA interference and RNase H-mediated knockdown can have any format or structural element thereof described herein or known in the art.

[1232] In some embodiments, a provided composition comprises a combination of one or more provided oligonucleotide types. One of skill in the chemical and medicinal arts will recognize that the selection and amount of each of the one or more types of provided oligonucleotides in a provided composition will depend on the intended use of that composition. That is to say, one of skill in the relevant arts would design a provided chirally controlled oligonucleotide composition such that the amounts and types of provided oligonucleotides contained therein cause the composition as a whole to have certain desirable characteristics (e.g., biologically desirable, therapeutically desirable, etc.).

[1233] In some embodiments, a provided oligonucleotide type is selected from those described in WO/2014/012081 and WO/2015/107425, the oligonucleotides, oligonucleotide types, oligonucleotide compositions, and methods thereof of each of which are incorporated herein by reference. In some embodiments, a provided chirally controlled oligonucleotide composition comprises oligonucleotides of an APOC3 oligonucleotide type selected from those described in WO/2014/012081 and WO/2015/107425.

[1234] In some embodiments, the present disclosure pertains to a composition comprising a chirally controlled oligonucleotide composition, wherein the sequence of the oligonucleotide comprises or consists of the sequence of any chirally controlled oligonucleotide composition disclosed herein.

[1235] In some embodiments, the present disclosure pertains to a composition comprising a chirally controlled oligonucleotide composition, wherein the sequence of the oligonucleotide comprises or consists of the sequence of any single-stranded RNAi agent composition listed in Table 1A or otherwise described herein.

[1236] In some embodiments, the present disclosure pertains to compositions comprising a multimer of oligonucleotides, e.g., single-stranded RNAi agents, antisense oligonucleotides and/or other oligonucleotides, at least one of which has a structure, sequence or other characteristic as described herein.

[1237] In some embodiments, the present disclosure pertains to compositions comprising a multimer of single-stranded RNAi agents, antisense oligonucleotides and/or other oligonucleotides, wherein the multimer is at least about 16 kD in size.

[1238] In some embodiments, the present disclosure pertains to compositions comprising a multimer of single-stranded RNAi agents, antisense oligonucleotides and/or other oligonucleotides, and further comprises a carbohydrate moiety, lipid moiety, targeting moiety, or other compound.

[1239] In some embodiments, the present disclosure pertains to compositions comprising a multimer of single-stranded RNAi agents, antisense oligonucleotides and/or other oligonucleotides, and further comprises a carbohydrate moiety, lipid moiety, targeting moiety, or other compound, the total weight of which is at least about 16 kD in size.

[1240] In some embodiments, the multimer can comprise at least 2 single-stranded RNAi agents, antisense oligonucleotides and/or other oligonucleotides. In some embodiments, the multimer can comprise at least 3 single-stranded RNAi agents, antisense oligonucleotides and/or other oligonucleotides. In some embodiments, the multimer can comprise at least 4 single-stranded RNAi agents, antisense oligonucleotides and/or other oligonucleotides. In some embodiments, the multimer can comprise at least 5 single-stranded RNAi agents, antisense oligonucleotides and/or other oligonucleotides. In some embodiments, the multimer can comprise at least 6 single-stranded RNAi agents, antisense oligonucleotides and/or other oligonucleotides. In some embodiments, the multimer can comprise at least 7 single-stranded RNAi agents, antisense oligonucleotides and/or other oligonucleotides. In some embodiments, the multimer can comprise at least 8 single-stranded RNAi agents, antisense oligonucleotides and/or other oligonucleotides. In some embodiments, the multimer can comprise at least 9 single-stranded RNAi agents, antisense oligonucleotides and/or other oligonucleotides. In some embodiments, the multimer can comprise at least 10 single-stranded RNAi agents, antisense oligonucleotides and/or other oligonucleotides.

[1241] Without wishing to be bound by any particular theory, the present disclosure suggests that multimerization of oligonucleotides can provide a multimer which has a total molecular weight sufficient for transport via the lymphatic system. Supersaxo et al. reported that there is a linear relationship between the molecular weight of a drug and the proportion of a dose absorbed lymphatically, and that molecules with a molecular weight greater than 16 kD are absorbed mainly by the lymphatics, which drain a subcutaneous injection site. Supersaxo et al. 1990 Pharm. Res. 7: 167-9. In some embodiments, an APOC3 oligonucleotide has a molecular weight of around 8 kD. In some embodiments, a multimer comprising multiple oligonucleotides has a molecular weight of at least around 16 kD.

[1242] Without wishing to be bound by any particular theory, the present disclosure notes that subcutaneous injections are reportedly widely utilized for delivery of drugs, including, but not limited to, those with limited oral availability, or as a means to modify or extend the release profile. McLennan et al. 2005 Drug Disc. Today: Technologies 2: 89-96. Subcutaneous injection reportedly results in delivery to the interstitial area underlying the dermis of the skin, from where drugs enter the circulatory system, or the lymphatic system; transport is reportedly affected by molecular weight, particle size, charge, hydrophilicity, and interaction with components in the interstitium. Drug formulation characteristics, such as drug concentration, injection volume, ionic strength, viscosity, and pH can also all reportedly play roles in diffusion from the subcutaneous injection site. McLennan et al. 2005; Paniagua et al. 2012 Lymphology 45: 144-153; and Bagby et al. 2012 Pharmaceutics 4: 276-295.

[1243] In some embodiments, one or more characteristic of molecular weight, particle size, charge, hydrophilicity, and interaction with components in the interstitium, drug concentration, injection volume, ionic strength, viscosity, and/or pH are modulated to improve or maximize the efficacy, bioavailability or delivery of a composition comprising an APOC3 oligonucleotide.

[1244] As noted above, molecules with a molecular weight greater than 16 kD are reportedly absorbed mainly by the lymphatics. Supersaxo et al. 1990 Pharm. Res. 7: 167-9. In some embodiments, the present disclosure pertains to a composition comprising a multimer of oligonucleotides, wherein the multimer has a total molecular weight of at least about 16 kD. In some embodiments, the present disclosure pertains to a composition comprising two or more different types or sizes of multimers of oligonucleotides, wherein the one or more of the different types of multimer has a total molecular weight of at least about 16 kD.

[1245] In some embodiments, each oligonucleotide in a multimer can target the same or different targets. In some embodiments, wherein the each oligonucleotide in a multimer can target the same or different targets, administration of the multimer can be used to treat a disease involving over-expression or multiple target genes. In some embodiments, wherein the each oligonucleotide in a multimer can target the same or different targets, administration of the multimer can be used to treat different diseases involving over-expression of different target genes.

[1246] In some embodiments, each oligonucleotide in a multimer can target the same sequence in the same target. In some embodiments, each oligonucleotide in a multimer can target different sequences in the same target.

[1247] Non-limiting examples of multimers are shown in Table 89A.

[1248] In some embodiments, a multimer comprises two or more oligonucleotides directly connected to each other (e.g., via a bond or direct bond, such as a covalent bond), or via a linker.

[1249] Any linker described herein or known in the art can be used to link the oligonucleotides in a multimer. Various approaches for construction of multimers and use of various linkers is illustrated in Table 89B and 89C.

[1250] Without wishing to be bound by any particular theory, the present disclosure notes that, in at least some cases, a phosphorothioate in the Rp configuration is particularly susceptible to nuclease cleavage. In some embodiments of Multimer Type 2, a multimer is essentially a single long oligonucleotide, wherein the oligonucleotide comprises multiple shorter oligonucleotides, which are connected by short linker oligonucleotides. In some embodiments of Multimer Type 2, a multimer is essentially a single long oligonucleotide, wherein the oligonucleotide comprises multiple shorter oligonucleotides, which are connected by short linker oligonucleotides, wherein the short linker oligonucleotides comprise one or more internucleotidic linkages in the Rp configuration. In some embodiments of Multimer Type 2, a multimer is essentially a single long oligonucleotide, wherein the oligonucleotide comprises multiple shorter oligonucleotides, which are connected by short linker oligonucleotides, wherein the short linker oligonucleotides comprise one or more phosphorothioates in the Rp configuration.

[1251] Non-limiting examples of linkers include: a cleavable linker or a biodegradable linker; a non-cleavable or non-biodegradable linker; a linker comprising one or more internucleotidic linkages comprising a chiral center in the Rp configuration; a linker comprising one or more internucleotidic linkages comprising a chiral phosphorus in the Rp configuration; a linker comprising one or more phosphorothioate in the Rp configuration; a linker comprising two or more phosphorothioate in the Rp configuration; a linker comprising three or more phosphorothioate in the Rp configuration; a photocleavable linker; 1-(5-(N-maleimidomethyl)-2-nitrophenyl)ethanol N-hydroxysuccinimide ester; a linker comprising a maleimido moiety; a linker comprising a N-hydroxysuccinimide ester moiety; a linker conjugated to an APOC3 oligonucleotide at a base; a linker conjugated to an APOC3 oligonucleotide at an internucleotidic linkage; a linker conjugated at a sugar; a phosphodiester; a phosphotriester; a methylphosphonate; a P3′→N5′ phosphoramidate; a N3′→P5′ phosphoramidate; a N3′→P5′ thio-phosphoramidate; a phosphorothioate linkage; a thiourea linker; a C5 or C6 linker, as described in U.S. Pat. No. 9,572,891; a linker comprising a alkyl, cycloalkyl, aryl, heterocyclyl, and heteroaryl; a linker comprising a substituted alkyl, cycloalkyl, aryl, heterocyclyl, and heteroaryl; a linker of the structure of formula (A) of U.S. Pat. No. 9,512,163; a linker comprising a C1-C12 hydrocarbyl chain; a polyethylene glycol linker; a hexaethylene glycol linker; a hydrocarbyl chain; a substituted hydrocarbyl chain; a linker comprising one or more of: alkyl, substituted or unsubstituted alkenyl, substituted or unsubstituted alkynyl, arylalkyl, arylalkenyl, arylalkynyl, heteroarylalkyl, heteroarylalkenyl, heteroarylalkynyl, heterocyclylalkyl, heterocyclylalkenyl, heterocyclylalkynyl, aryl, heteroaryl, heterocyclyl, cycloalkyl, cycloalkenyl, alkylarylalkyl, alkylarylalkenyl, alkylarylalkynyl, alkenylarylalkyl, alkenylarylalkenyl, alkenylarylalkynyl, alkynylarylalkyl, alkynylarylalkenyl, alkynylarylalkynyl, alkylheteroarylalkyl, alkylheteroarylalkenyl, alkylheteroarylalkynyl, alkenylheteroarylalkyl, alkenylheteroarylalkenyl, alkenylheteroarylalkynyl, alkynylheteroarylalkyl, alkynylheteroarylalkenyl, alkynylheteroarylalkynyl, alkylheterocyclylalkyl, alkylheterocyclylalkenyl, alkylhererocyclylalkynyl, alkenylheterocyclylalkyl, alkenylheterocyclylalkenyl, alkenylheterocyclylalkynyl, alkynylheterocyclylalkyl, alkynylheterocyclylalkenyl, alkynylheterocyclylalkynyl, alkylaryl, alkenylaryl, alkynylaryl, alkylheteroaryl, alkenylheteroaryl, or alkynylhereroaryl; a linker comprising a peptide having an amino acid sequence selected from: ALAL, APISFFELG, FL, GFN, R/KXX, GRWHTVGLRWE, YL, GF, and FF, in which X is any amino acid; a linker comprising the formula —(CH2)wS-S(CH2)m-, wherein n and m are independently integers from 0 to 10; a linker comprising a low pH-labile bond; a linker comprising a low pH-labile bond comprising an amine, an imine, an ester, a benzoic imine, an amino ester, a diortho ester, a polyphosphoester, a polyphosphazene, an acetal, a vinyl ether, a hydrazone, an azidomethyl-methylmaleic anhydride, a thiopropionate, a masked endosomolytic agent or a citraconyl group; a branched linker; a cleavable linker susceptible to cleavage agents, e.g., pH, redox potential or the presence of degradative molecules; a redox cleavable linker; a phosphate-based cleavable linker; a phosphate-based cleavable linker comprising: —O—P(O)(OH)—O—, —O—P(S)(OH)—O—, —O—P(S)(SH—O—, —O—P(O)(OH—S—, —S—P(O)(OH—S—, —O—P(S)(OH—S—, —S—P(S)(OH—O—, —O—P(O)(H)—O—, —O—P(S)(H)—O—, —S—P(O)(H)—O—, —S—P(S)(H)—O—, —S—P(O)(H—S—, or —O—P(S)(H—S—; an acid cleavable linker; an ester-based linker; a peptide-based cleavable linker; and moieties comprising any of these linkers.

[1252] In some embodiments, a linker comprises a polypeptide that is more susceptible to cleavage by an endopeptidase in the mammalian extract than the targeting oligonucleotides. In some embodiments, the endopeptidase is trypsin, chymotrypsin, elastase, thermolysin, pepsin, or endopeptidase V8. In some embodiments, the endopeptidase is cathepsin B, cathepsin D, cathepsin L, cathepsin C, papain, cathepsin S or endosomal acidic insulinase.

[1253] Various linkers and methods of multimerization of oligonucleotides are described in, as non-limiting examples: U.S. Pat. Nos. 9,370,582; 9,371,348; 9,512,163; 9,572,891; and 6,031,091; and international published patent applications WO1998000435; WO2014043544; and WO2013040429.

[1254] The disclosure also notes that any linker described herein, or known in the art, can be used to link one or more oligonucleotides to each other, or to link one or more moiety (as non-limiting examples, a targeting moiety, a carbohydrate moiety, a GalNAc moiety, a lipid moiety, etc.) to one or more oligonucleotides (as non-limiting examples, a single-stranded RNAi agent, an antisense oligonucleotide, a double-stranded RNAi agent, an APOC3 oligonucleotide capable of directing or inhibiting exon skipping, etc.).

### Example Methods for Preparing Oligonucleotides and Compositions

[1255] Methods for preparing provided oligonucleotides and oligonucleotide compositions are widely known in the art, including but not limited to those described in WO/2010/064146, WO/2011/005761, WO/2013/012758, WO/2014/010250, US2013/0178612, WO/2014/012081, WO/2015/107425, PCT/US2016/043542, and PCT/US2016/043598, the methods and reagents of each of which is incorporated herein by reference.

[1256] Chirally Controlled Oligonucleotides.

[1257] In some embodiments, provided oligonucleotides are capable of directing a decrease in the expression and/or level of a target gene or its gene product. In some embodiments, provided oligonucleotides are chirally controlled.

[1258] In some embodiments, the present disclosure provides chirally controlled oligonucleotide compositions that, when compared to a reference condition [e.g., absence of the composition, presence of a reference composition (e.g., a stereorandom composition of oligonucleotides having the same base sequence, the same chemical modifications, etc., an APOC3 oligonucleotide or single-stranded RNAi agent of another stereoisomer, etc.), and combinations thereof], are capable of directing a decrease in the expression and/or level of a target gene or its gene product.

[1259] In some embodiments, the present disclosure provides chirally controlled oligonucleotide compositions that, when compared to a reference condition [e.g., absence of the composition, presence of a reference composition (e.g., a stereorandom composition of oligonucleotides having the same base sequence, the same chemical modifications, etc., an APOC3 oligonucleotide or single-stranded RNAi agent of another stereoisomer, etc.), and combinations thereof], mediate improved knockdown of transcripts via single-stranded RNA interference or RNase H.

[1260] Among other things, the present disclosure provides chirally controlled ssRNAi agents and chirally controlled compositions comprising one or more specific nucleotide types. In some embodiments, the phrase “oligonucleotide type,” as used herein, defines an APOC3 oligonucleotide that has a particular base sequence, pattern of backbone linkages, pattern of backbone chiral centers, and pattern of backbone phosphorus modifications (e.g., “—XLR¹” groups). Oligonucleotides of a common designated “type” are structurally identical to one another with respect to base sequence, pattern of backbone linkages, pattern of backbone chiral centers, and pattern of backbone phosphorus modifications. In some embodiments, oligonucleotides of an APOC3 oligonucleotide type are identical.

[1261] In some embodiments, a provided chirally controlled oligonucleotide or single-stranded RNAi agent in the disclosure has properties different from those of the corresponding stereorandom oligonucleotide or single-stranded RNAi agent mixture. In some embodiments, a chirally controlled oligonucleotide or single-stranded RNAi agent has lipophilicity different from that of the stereorandom oligonucleotide or single-stranded RNAi agent mixture. In some embodiments, a chirally controlled oligonucleotide or single-stranded RNAi agent has different retention time on HPLC. In some embodiments, a chirally controlled oligonucleotide or single-stranded RNAi agent may have a peak retention time significantly different from that of the corresponding stereorandom oligonucleotide or single-stranded RNAi agent mixture. During oligonucleotide or single-stranded RNAi agent purification using HPLC as generally practiced in the art, certain chirally controlled oligonucleotide or single-stranded RNAi agents will be largely if not totally lost. During oligonucleotide or single-stranded RNAi agent purification using HPLC as generally practiced in the art, certain chirally controlled oligonucleotide or single-stranded RNAi agents will be largely if not totally lost. One of the consequences is that certain diastereomers of a stereorandom oligonucleotide or single-stranded RNAi agent mixture (certain chirally controlled oligonucleotide or single-stranded RNAi agents) are not tested in assays. Another consequence is that from batches to batches, due to the inevitable instrumental and human errors, the supposedly “pure” stereorandom oligonucleotide or single-stranded RNAi agent will have inconsistent compositions in that diastereomers in the composition, and their relative and absolute amounts, are different from batches to batches. The chirally controlled oligonucleotide or single-stranded RNAi agent and chirally controlled oligonucleotide or single-stranded RNAi agent compositions provided in this disclosure overcome such problems, as a chirally controlled oligonucleotide or single-stranded RNAi agent is synthesized in a chirally controlled fashion as a single diastereomer (diastereoisomer), and a oligonucleotide or single-stranded RNAi agent comprises predetermined levels of one or more individual oligonucleotide or single-stranded RNAi agent types.

[1262] One of skill in the chemical and synthetic arts will appreciate that synthetic methods of the present disclosure provide for a degree of control during each step of the synthesis of a provided single-stranded RNAi agent such that each nucleotide unit of the single-stranded RNAi agent can be designed and/or selected in advance to have a particular stereochemistry at the linkage phosphorus and/or a particular modification at the linkage phosphorus, and/or a particular base, and/or a particular sugar. In some embodiments, a provided single-stranded RNAi agent is designed and/or selected in advance to have a particular combination of stereocenters at the linkage phosphorus of the internucleotidic linkage.

[1263] In some embodiments, a provided single-stranded RNAi agent made using methods of the present disclosure is designed and/or determined to have a particular combination of linkage phosphorus modifications. In some embodiments, a provided single-stranded RNAi agent made using methods of the present disclosure is designed and/or determined to have a particular combination of bases. In some embodiments, a provided single-stranded RNAi agent made using methods of the present disclosure is designed and/or determined to have a particular combination of sugars. In some embodiments, a provided single-stranded RNAi agent made using methods of the present disclosure is designed and/or determined to have a particular combination of one or more of the above structural characteristics.

[1264] Methods of the present disclosure exhibit a high degree of chiral control. For instance, methods of the present disclosure facilitate control of the stereochemical configuration of every single linkage phosphorus within a provided single-stranded RNAi agent. In some embodiments, methods of the present disclosure provide an single-stranded RNAi agent comprising one or more modified internucleotidic linkages independently having the structure of Formula I.

[1265] In some embodiments, methods of the present disclosure provide an single-stranded RNAi agent which is a unimer. In some embodiments, methods of the present disclosure provide an single-stranded RNAi agent which is a unimer of configuration Rp. In some embodiments, methods of the present disclosure provide an single-stranded RNAi agent which is a unimer of configuration Sp.

[1266] In some embodiments, methods of the present disclosure provide a chirally controlled single-stranded RNAi agent composition, i.e., an single-stranded RNAi agent composition that contains predetermined levels of individual single-stranded RNAi agent types. In some embodiments an APOC3 oligonucleotide or a single-stranded RNAi agent comprises one single-stranded RNAi agent type. In some embodiments, a single-stranded RNAi agent comprises more than one single-stranded RNAi agent type. In some embodiments, an APOC3 oligonucleotide or single-stranded RNAi agent composition comprises a plurality of oligonucleotide and/or single-stranded RNAi agent types. Example chirally controlled oligonucleotide and single-stranded RNAi agent compositions made in accordance with the present disclosure are described herein.

[1267] In some embodiments, an APOC3 oligonucleotide comprises a chiral internucleotidic linkage (e.g., is stereocontrolled). In some embodiments, an APOC3 oligonucleotide comprises a chiral internucleotidic linkage which is stereocontrolled and a chiral internucleotidic linkage which is not stereocontrolled. In some embodiments, an APOC3 oligonucleotide comprises a chiral internucleotidic linkage which is stereocontrolled and an internucleotidic linkage which is not chiral. Various non-limiting examples of formats of stereocontrolled (chirally controlled) oligonucleotides are shown in Tables 71A to 71C. In some embodiments, an APOC3 oligonucleotide has a structure of Format 51. In some embodiments, an APOC3 oligonucleotide has a structure of Format S2. In some embodiments, an APOC3 oligonucleotide has a structure of Format S3. In some embodiments, an APOC3 oligonucleotide has a structure of Format S4. In some embodiments, an APOC3 oligonucleotide has a structure of Format S5. In some embodiments, an APOC3 oligonucleotide has a structure of Format S6. In some embodiments, an APOC3 oligonucleotide has a structure of Format S7. In some embodiments, an APOC3 oligonucleotide has a structure of Format S8. In some embodiments, an APOC3 oligonucleotide has a structure of Format S9. In some embodiments, an APOC3 oligonucleotide has a structure of Format S10. In some embodiments, an APOC3 oligonucleotide has a structure of Format S11. In some embodiments, an APOC3 oligonucleotide has a structure of Format S12. In some embodiments, an APOC3 oligonucleotide has a structure of Format S13. In some embodiments, an APOC3 oligonucleotide has a structure of Format S14. In some embodiments, an APOC3 oligonucleotide has a structure of Format S15. In some embodiments, an APOC3 oligonucleotide has a structure of Format S16. In some embodiments, an APOC3 oligonucleotide has a structure of Format S17. In some embodiments, an APOC3 oligonucleotide has a structure of Format S18. In some embodiments, an APOC3 oligonucleotide has a structure of Format S19. In some embodiments, an APOC3 oligonucleotide has a structure of Format S20. In some embodiments, an APOC3 oligonucleotide has a structure of Format S21. In some embodiments, an APOC3 oligonucleotide has a structure of Format S22. In some embodiments, an APOC3 oligonucleotide has a structure of Format S23. In some embodiments, an APOC3 oligonucleotide has a structure of Format S24. In some embodiments, an APOC3 oligonucleotide has a structure of Format S25. In some embodiments, an APOC3 oligonucleotide has a structure of Format S26. In some embodiments, an APOC3 oligonucleotide has a structure of Format S27. In some embodiments, an APOC3 oligonucleotide has a structure of Format S28. In some embodiments, an APOC3 oligonucleotide has a structure of Format S29. In some embodiments, an APOC3 oligonucleotide has a structure of Format S30. In some embodiments, an APOC3 oligonucleotide has a structure of Format S31. In some embodiments, an APOC3 oligonucleotide has a structure of Format S32. In some embodiments, an APOC3 oligonucleotide has a structure of Format S33. In some embodiments, an APOC3 oligonucleotide has a structure of Format S34. In some embodiments, an APOC3 oligonucleotide has a structure of Format S35. In some embodiments, an APOC3 oligonucleotide has a structure of Format S36. In some embodiments, an APOC3 oligonucleotide has a structure of Format S37. In some embodiments, an APOC3 oligonucleotide has a structure of Format S38. In some embodiments, an APOC3 oligonucleotide has a structure of Format S39. In some embodiments, an APOC3 oligonucleotide has a structure of Format S40. In some embodiments, an APOC3 oligonucleotide has a structure of Format S41. In some embodiments, an APOC3 oligonucleotide has a structure of Format S42. In some embodiments, an APOC3 oligonucleotide has a structure of Format S43. In some embodiments, an APOC3 oligonucleotide has a structure of Format S44.

[1268] In some embodiments, methods of the present disclosure provide chirally pure compositions with respect to the configuration of the linkage phosphorus. That is to say, in some embodiments, methods of the present disclosure provide compositions of wherein the oligonucleotide exists in the composition in the form of a single diastereomer with respect to the configuration of the linkage phosphorus.

[1269] In some embodiments, methods of the present disclosure provide chirally uniform compositions with respect to the configuration of the linkage phosphorus. That is to say, in some embodiments, methods of the present disclosure provide compositions of in which all nucleotide units therein have the same stereochemistry with respect to the configuration of the linkage phosphorus, e.g., all nucleotide units are of the Rp configuration at the linkage phosphorus or all nucleotide units are of the Sp configuration at the linkage phosphorus.

[1270] In some embodiments, an APOC3 oligonucleotide or a single-stranded RNAi agent comprises at least one Sp (e.g., a phosphorothioate or other internucleotidic linkage having a chiral center, in the Sp configuration). In some embodiments, an APOC3 oligonucleotide or a single-stranded RNAi agent comprises at least 5 Sp. In some embodiments, an APOC3 oligonucleotide or a single-stranded RNAi agent comprises at least 10 Sp. In some embodiments, an APOC3 oligonucleotide or a single-stranded RNAi agent comprises at least 15 to 25 Sp.

[1271] As shown herein, the incorporation of one or more Sp internucleotidic linkage or one or more Sp PS (phosphorothioate) performs two functions for a single-stranded RNAi agent: (a) it increases stability against nucleases; and (b) does not interfere with RNA interference activity. While single-stranded RNAi agents and double-stranded RNAi agents differ in many aspects, this disclosure notes that, reportedly, many chemical modifications have been attempted for double-stranded RNAi agents, wherein the modifications did not both (a) stabilize the molecule against nucleases; and (b) allow RNA interference activity. Many chemical modifications reportedly perform one function but not the other. Some chemical modifications of double-stranded RNAi agents reportedly stabilized the molecule against nucleases, but interfered with or abolished RNAi activity. Other chemical modifications of double-stranded RNAi agents reportedly did not interfere with RNAi activity, but also did not stabilize the molecules against nucleases. See, for example, Czauderna et al. 2003 Nucl. Acids Res. 31: 2705-2716; Hadwiger et al. 2005, pages 194-206, in RNA interference Technology, ed. K. Appasani, Cambridge University Press, Cambridge, UK; Deleavey et al. 2009 Curr. Prot. Nucl. Acid Chem. 16.3.1-16.3.22; Terrazas et al. 2009 Nucl. Acids Res. 37: 346-353; Schwarz et al. 2002 Mol. Cell 10: 537-548; and Lipardi et al. 2001 Cell 107: 299-307. Only a minority of chemical modifications of double-stranded RNAi agents were capable of performing both functions. Furthermore, Matranga et al. 2005 Cell 123: 607-620 showed that introduction of a single Sp internucleotidic linkage (e.g., a single Sp PS) into the sense strand of a double-stranded RNAi agent greatly decreased RISC assembly and RNA interference activity. Thus, the chemical modification of a double-stranded RNAi agent with a single Sp internucleotidic linkage (e.g., a single Sp PS) did not (b) allow RNA interference activity. Thus, this disclosure endeavored to test the effect(s) of incorporation of Sp internucleotidic linkages or Sp PS into a single-stranded RNAi agent. The data shown herein show that, surprisingly, the incorporation of a Sp internucleotidic linkage or Sp PS performs two functions for a single-stranded RNAi agent: (a) it increases stability against nucleases; and (b) does not interfere with RNA interference activity.

[1272] As shown in the data shown in Table 45, the stability of a single-stranded RNAi agent against nucleases was increased by converting a stereorandom phosphorothioate at the 5′-end and/or 3′-end to a phosphorothioate in the Sp configuration. Additional increases in stability were obtained by converting stereorandom phosphorothioates at nuclease cleavage sites identified herein to phosphorothioates in the Sp configuration.

[1273] Without wishing to be bound by any particular theory, the disclosure suggests that incorporation of phosphorothioates or other chiral internucleotidic linkages in a Sp configuration may protect single-stranded RNAi agents from nucleases. Table 45 indicates various nuclease cleavage sites identified in a stereorandom APOC3 single-stranded RNAi agent, WV-2817. These major cleavage sites are between two pyrimidines (5′-U′U-3′, 5′-U′U-3′ or 5′-T′U-3′, where indicates the cleavage site). Additional major nuclease cleavage sites were identified for stereorandom single-stranded RNAi agent WV-3242: 5′-U′U-3′, 5′—C′U-3′, and 5′-T′U-3′. Of the six major nuclease cleavage sites, five were between two adjacent pyrimidines and one was adjacent to a pyrimidine. Experimental data shown in Table 45 indicates that replacing one or more of the nuclease cleavage sites with a Sp internucleotidic linkage (or chiral internucleotidic linkage in a Sp configuration, e.g., a Sp PS or a phosphorothioate in the Sp configuration) greatly increased the stability of the single-stranded RNAi agents.

[1274] Single-stranded RNAi agents comprising multiple Sp internucleotidic linkages (e.g., Sp PS) were also tested to determine if the Sp abolished RNAi activity. The present disclosure notes that previous work has shown that many stereorandom oligonucleotides can decrease or completely lose their enzymatic or biological activity if converted into stereocontrolled versions. For many previously described oligonucleotides, introduction of Sp internucleotidic linkages can decrease or abolish activity.

[1275] Table 44 shows that, surprisingly, in addition to increasing stability, replacing multiple internucleotidic linkages (whether stereorandom or phosphodiester) with Sp internucleotidic linkages (e.g., Sp PS) did not decrease or eliminate RNA interference activity of a single-stranded RNAi agent. These results are also surprising because, reportedly, the introduction of a Sp PS into a stereorandom oligonucleotide in many cases is known to reduce biological activity. Thus, the introduction of one or more Sp internucleotidic linkages or Sp PS both increased stability of a single-stranded RNAi agent, and did not decrease or abolish RNAi activity.

[1276] Table 69A to C also shows that, surprisingly, in addition to increasing stability, replacing multiple internucleotidic linkages (whether stereorandom or phosphodiester) with Sp internucleotidic linkages (e.g., Sp PS) increased stability in and simultaneously did not decrease or eliminate RNA interference activity of a single-stranded RNAi agent. In some cases, activity was increased. These results are also surprising because, reportedly, the introduction of a Sp PS into a stereorandom oligonucleotide in many cases is known to reduce biological activity. Thus, the introduction of one or more Sp internucleotidic linkages or Sp PS both increased stability of a single-stranded RNAi agent, and did not decrease or abolish RNAi activity.

[1277] In some embodiments or a single-stranded RNAi agent, the oligonucleotide or single-stranded RNAi comprises 1 or more Sp internucleotidic linkages. In some embodiments or a single-stranded RNAi agent, the oligonucleotide or single-stranded RNAi comprises 1 or more Sp internucleotidic linkages at the 5′ and/or 3′-end of the oligonucleotide or single-stranded RNAi agent. In some embodiments or a single-stranded RNAi agent, the oligonucleotide or single-stranded RNAi comprises 1 or more Sp internucleotidic linkages at sites susceptible to nuclease cleavage.

[1278] In some embodiments or a single-stranded RNAi agent, the oligonucleotide or single-stranded RNAi comprises 1 or more Sp PS. In some embodiments or a single-stranded RNAi agent, the oligonucleotide or single-stranded RNAi comprises 1 or more Sp PS at the 5′ and/or 3′-end of the oligonucleotide or single-stranded RNAi agent. In some embodiments or a single-stranded RNAi agent, the oligonucleotide or single-stranded RNAi comprises 1 or more Sp PS at sites susceptible to nuclease cleavage.

[1279] Among other things, the present disclosure recognizes the challenge of stereoselective (rather than stereorandom or racemic) preparation of single-stranded RNAi agents. Among other things, the present disclosure provides methods and reagents for stereoselective preparation of single-stranded RNAi agents comprising multiple (e.g., more than 5, 6, 7, 8, 9, or 10) internucleotidic linkages, and particularly for single-stranded RNAi agents comprising multiple (e.g., more than 5, 6, 7, 8, 9, or 10) chiral internucleotidic linkages. In some embodiments, in a stereorandom or racemic preparation of single-stranded RNAi agents, at least one chiral internucleotidic linkage is formed with less than 90:10, 95:5, 96:4, 97:3, or 98:2 diastereoselectivity. In some embodiments, for a stereoselective or chirally controlled preparation of single-stranded RNAi agents, each chiral internucleotidic linkage is formed with greater than 90:10, 95:5, 96:4, 97:3, or 98:2 diastereoselectivity. In some embodiments, for a stereoselective or chirally controlled preparation of single-stranded RNAi agents, each chiral internucleotidic linkage is formed with greater than 95:5 diastereoselectivity. In some embodiments, for a stereoselective or chirally controlled preparation of single-stranded RNAi agents, each chiral internucleotidic linkage is formed with greater than 96:4 diastereoselectivity. In some embodiments, for a stereoselective or chirally controlled preparation of single-stranded RNAi agents, each chiral internucleotidic linkage is formed with greater than 97:3 diastereoselectivity. In some embodiments, for a stereoselective or chirally controlled preparation of single-stranded RNAi agents, each chiral internucleotidic linkage is formed with greater than 98:2 diastereoselectivity. In some embodiments, for a stereoselective or chirally controlled preparation of single-stranded RNAi agents, each chiral internucleotidic linkage is formed with greater than 99:1 diastereoselectivity. In some embodiments, diastereoselectivity of a chiral internucleotidic linkage in an single-stranded RNAi agent may be measured through a model reaction, e.g. formation of a dimer under essentially the same or comparable conditions wherein the dimer has the same internucleotidic linkage as the chiral internucleotidic linkage, the 5′-nucleoside of the dimer is the same as the nucleoside to the 5′-end of the chiral internucleotidic linkage, and the 3′-nucleoside of the dimer is the same as the nucleoside to the 3′-end of the chiral internucleotidic linkage.

[1280] In some embodiments, an APOC3 oligonucleotide or a single-stranded RNAi agent is a composition designed to comprise multiple oligonucleotide or single-stranded RNAi agent types. In some embodiments, methods of the present disclosure allow for the generation of a library of chirally controlled single-stranded RNAi agents such that a pre-selected amount of any one or more chirally controlled single-stranded RNAi agent types can be mixed with any one or more other chirally controlled single-stranded RNAi agent types to create a chirally controlled single-stranded RNAi agent composition. In some embodiments, the pre-selected amount of an single-stranded RNAi agent type is a composition having any one of the above-described diastereomeric purities.

[1281] In some embodiments, the present disclosure provides methods for making a chirally controlled single-stranded RNAi agent comprising steps of:

[1282] (1) coupling;

[1283] (2) capping;

[1284] (3) modifying;

[1285] (4) deblocking; and

[1286] (5) repeating steps (1)-(4) until a desired length is achieved.

[1287] When describing the provided methods, the word “cycle” has its ordinary meaning as understood by a person of ordinary skill in the art. In some embodiments, one round of steps (1)-(4) is referred to as a cycle.

[1288] In some embodiments, the present disclosure provides methods for making chirally controlled single-stranded RNAi agent compositions, comprising steps of:

[1289] (a) providing an amount of a first chirally controlled single-stranded RNAi agent; and

[1290] (b) optionally providing an amount of one or more additional chirally controlled single-stranded RNAi agents.

[1291] In some embodiments, a first chirally controlled single-stranded RNAi agent is an single-stranded RNAi agent type, as described herein. In some embodiments, a one or more additional chirally controlled single-stranded RNAi agent is a one or more single-stranded RNAi agent type, as described herein.

[1292] One of skill in the relevant chemical and synthetic arts will recognize the degree of versatility and control over structural variation and stereochemical configuration of a provided single-stranded RNAi agent when synthesized using methods of the present disclosure. For instance, after a first cycle is complete, a subsequent cycle can be performed using a nucleotide unit individually selected for that subsequent cycle which, in some embodiments, comprises a nucleobase and/or a sugar that is different from the first cycle nucleobase and/or sugar. Likewise, the chiral auxiliary used in the coupling step of the subsequent cycle can be different from the chiral auxiliary used in the first cycle, such that the second cycle generates a phosphorus linkage of a different stereochemical configuration. In some embodiments, the stereochemistry of the linkage phosphorus in the newly formed internucleotidic linkage is controlled by using stereochemically pure phosphoramidites. Additionally, the modification reagent used in the modifying step of a subsequent cycle can be different from the modification reagent used in the first or former cycle. The cumulative effect of this iterative assembly approach is such that each component of a provided single-stranded RNAi agent can be structurally and configurationally tailored to a high degree. An additional advantage to this approach is that the step of capping minimizes the formation of “n−1” impurities that would otherwise make isolation of a provided single-stranded RNAi agent extremely challenging, and especially single-stranded RNAi agents of longer lengths.

[1293] In some embodiments, an example cycle of the method for making chirally controlled single-stranded RNAi agents is illustrated in example schemes described in the present disclosure. In some embodiments, an example cycle of the method for making chirally controlled single-stranded RNAi agents is illustrated in Scheme I. In some embodiments, [symbol] represents the solid support, and optionally a portion of the growing chirally controlled single-stranded RNAi agent attached to the solid support. The chiral auxiliary exemplified has the structure of formula 3-I:

[chemical structure]

which is further described below. “Cap” is any chemical moiety introduced to the nitrogen atom by the capping step, and in some embodiments, is an amino protecting group. One of ordinary skill in the art understands that in the first cycle, there may be only one nucleoside attached to the solid support when started, and cycle exit can be performed optionally before deblocking. As understood by a person of skill in the art, B^{PRO} is a protected base used in single-stranded RNAi agent synthesis. Each step of the above-depicted cycle of Scheme I is described further below.

[chemical structure]

### Synthesis on Solid Support

[1294] In some embodiments, the synthesis of a provided single-stranded RNAi agent is performed on solid phase. In some embodiments, reactive groups present on a solid support are protected. In some embodiments, reactive groups present on a solid support are unprotected. During single-stranded RNAi agent synthesis a solid support is treated with various reagents in several synthesis cycles to achieve the stepwise elongation of a growing single-stranded RNAi agent chain with individual nucleotide units. The nucleoside unit at the end of the chain which is directly linked to the solid support is termed “the first nucleoside” as used herein. A first nucleoside is bound to a solid support via a linker moiety, i.e. a diradical with covalent bonds between either of a CPG, a polymer or other solid support and a nucleoside. The linker stays intact during the synthesis cycles performed to assemble the oligonucleotide chain and is cleaved after the chain assembly to liberate the oligonucleotide from the support.

[1295] Solid supports for solid-phase nucleic acid synthesis include the supports described in, e.g., U.S. Pat. Nos. 4,659,774, 5,141,813, 4,458,066; Caruthers U.S. Pat. Nos. 4,415,732, 4,458,066, 4,500,707, 4,668,777, 4,973,679, and 5,132,418; Andrus et al. U.S. Pat. Nos. 5,047,524, 5,262,530; and Koster U.S. Pat. No. 4,725,677 (reissued as RE34,069). In some embodiments, a solid phase is an organic polymer support. In some embodiments, a solid phase is an inorganic polymer support. In some embodiments, an organic polymer support is polystyrene, aminomethyl polystyrene, a polyethylene glycol-polystyrene graft copolymer, polyacrylamide, polymethacrylate, polyvinylalcohol, highly cross-linked polymer (HCP), or other synthetic polymers, carbohydrates such as cellulose and starch or other polymeric carbohydrates, or other organic polymers and any copolymers, composite materials or combination of the above inorganic or organic materials. In some embodiments, an inorganic polymer support is silica, alumina, controlled polyglass (CPG), which is a silica-gel support, or aminopropyl CPG. Other useful solid supports include fluorous solid supports (see e.g., WO/2005/070859), long chain alkylamine (LCAA) controlled pore glass (CPG) solid supports (see e.g., S. P. Adams, K. S. Kavka, E. J. Wykes, S. B. Holder and G. R. Galluppi, J. Am. Chem. Soc., 1983, 105, 661-663; G. R. Gough, M. J. Bruden and P. T. Gilham, Tetrahedron Lett., 1981, 22, 4177-4180). Membrane supports and polymeric membranes (see e.g. Innovation and Perspectives in Solid Phase Synthesis, Peptides, Proteins and Nucleic Acids, ch 21 pp 157-162, 1994, Ed. Roger Epton and U.S. Pat. No. 4,923,901) are also useful for the synthesis of nucleic acids. Once formed, a membrane can be chemically functionalized for use in nucleic acid synthesis. In addition to the attachment of a functional group to the membrane, the use of a linker or spacer group attached to the membrane is also used in some embodiments to minimize steric hindrance between the membrane and the synthesized chain.

[1296] Other suitable solid supports include those generally known in the art to be suitable for use in solid phase methodologies, including, for example, glass sold as Primer™ 200 support, controlled pore glass (CPG), oxalyl-controlled pore glass (see, e.g., Alul, et al., Nucleic Acids Research, 1991, 19, 1527), TentaGel Support-an aminopolyethyleneglycol derivatized support (see, e.g., Wright, et al., Tetrahedron Lett., 1993, 34, 3373), and Poros-a copolymer of polystyrene/divinylbenzene.

[1297] Surface activated polymers have been demonstrated for use in synthesis of natural and modified nucleic acids and proteins on several solid supports mediums. A solid support material can be any polymer suitably uniform in porosity, having sufficient amine content, and sufficient flexibility to undergo any attendant manipulations without losing integrity. Examples of suitable selected materials include nylon, polypropylene, polyester, polytetrafluoroethylene, polystyrene, polycarbonate, and nitrocellulose. Other materials can serve as a solid support, depending on the design of the investigator. In consideration of some designs, for example, a coated metal, in particular gold or platinum can be selected (see e.g., US publication No. 20010055761). In one embodiment of single-stranded RNAi agent synthesis, for example, a nucleoside is anchored to a solid support which is functionalized with hydroxyl or amino residues. Alternatively, a solid support is derivatized to provide an acid labile trialkoxytrityl group, such as a trimethoxytrityl group (TMT). Without being bound by theory, it is expected that the presence of a trialkoxytrityl protecting group will permit initial detritylation under conditions commonly used on DNA synthesizers. For a faster release of single-stranded RNAi agent material in solution with aqueous ammonia, a diglycoate linker is optionally introduced onto the support.

[1298] In some embodiments, a provided single-stranded RNAi agent alternatively is synthesized from the 5′ to 3′ direction. In some embodiments, a nucleic acid is attached to a solid support through its 5′ end of the growing nucleic acid, thereby presenting its 3′ group for reaction, i.e. using 5′-nucleoside phosphoramidites or in enzymatic reaction (e.g. ligation and polymerization using nucleoside 5′-triphosphates). When considering the 5′ to 3′ synthesis the iterative steps of the present disclosure remain unchanged (i.e. capping and modification on the chiral phosphorus).

### Linking Moiety

[1299] A linking moiety or linker is optionally used to connect a solid support to a compound comprising a free nucleophilic moiety. Suitable linkers are known such as short molecules which serve to connect a solid support to functional groups (e.g., hydroxyl groups) of initial nucleosides molecules in solid phase synthetic techniques. In some embodiments, the linking moiety is a succinamic acid linker, or a succinate linker (—CO—CH₂—CH₂—CO—), or an oxalyl linker (—CO—CO—). In some embodiments, the linking moiety and the nucleoside are bonded together through an ester bond. In some embodiments, a linking moiety and a nucleoside are bonded together through an amide bond. In some embodiments, a linking moiety connects a nucleoside to another nucleotide or nucleic acid. Suitable linkers are disclosed in, for example, Oligonucleotides And Analogues A Practical Approach, Ekstein, F. Ed., IRL Press, N.Y., 1991, Chapter 1 and Solid-Phase Supports for Oligonucleotide Synthesis, Pon, R. T., Curr. Prot. Nucleic Acid Chem., 2000, 3.1.1-3.1.28.

[1300] A linker moiety is used to connect a compound comprising a free nucleophilic moiety to another nucleoside, nucleotide, or nucleic acid. In some embodiments, a linking moiety is a phosphodiester linkage. In some embodiments, a linking moiety is an H-phosphonate moiety. In some embodiments, a linking moiety is a modified phosphorus linkage as described herein. In some embodiments, a universal linker (UnyLinker) is used to attached the oligonucleotide to the solid support (Ravikumar et al., Org. Process Res. Dev., 2008, 12 (3), 399-410). In some embodiments, other universal linkers are used (Pon, R. T., Curr. Prot. Nucleic Acid Chem., 2000, 3.1.1-3.1.28). In some embodiments, various orthogonal linkers (such as disulfide linkers) are used (Pon, R. T., Curr. Prot. Nucleic Acid Chem., 2000, 3.1.1-3.1.28).

[1301] Among other things, the present disclosure recognizes that a linker can be chosen or designed to be compatible with a set of reaction conditions employed in single-stranded RNAi agent synthesis. In some embodiments, to avoid degradation of single-stranded RNAi agents and to avoid desulfurization, auxiliary groups are selectively removed before de-protection. In some embodiments, DPSE group can selectively be removed by F⁻ ions. In some embodiments, the present disclosure provides linkers that are stable under a DPSE de-protection condition, e.g., 0.1M TBAF in MeCN, 0.5M HF-Et₃N in THF or MeCN, etc. In some embodiments, a provided linker is the SP linker. In some embodiments, the present disclosure demonstrates that the SP linker is stable under a DPSE de-protection condition, e.g., 0.1M TBAF in MeCN, 0.5M HF-Et₃N in THF or MeCN, etc.; they are also stable, e.g., under anhydrous basic conditions, such as om1M DBU in MeCN.

[chemical structure]

[1302] In some embodiments, an example linker is:

[chemical structure]

In some embodiments, the succinyl linker, Q-linker or oxalyl linker is not stable to one or more DPSE-deprotection conditions using F⁻.

### General Conditions—Solvents for Synthesis

[1303] Syntheses of provided oligonucleotides are generally performed in aprotic organic solvents. In some embodiments, a solvent is a nitrile solvent such as, e.g., acetonitrile. In some embodiments, a solvent is a basic amine solvent such as, e.g., pyridine. In some embodiments, a solvent is an ethereal solvent such as, e.g., tetrahydrofuran. In some embodiments, a solvent is a halogenated hydrocarbon such as, e.g., dichloromethane. In some embodiments, a mixture of solvents is used. In certain embodiments a solvent is a mixture of any one or more of the above-described classes of solvents.

[1304] In some embodiments, when an aprotic organic solvent is not basic, a base is present in the reacting step. In some embodiments where a base is present, the base is an amine base such as, e.g., pyridine, quinoline, or N,N-dimethylaniline. Example other amine bases include pyrrolidine, piperidine, N-methyl pyrrolidine, pyridine, quinoline, N,N-dimethylaminopyridine (DMAP), or N,N-dimethylaniline.

[1305] In some embodiments, a base is other than an amine base.

[1306] In some embodiments, an aprotic organic solvent is anhydrous. In some embodiments, an anhydrous aprotic organic solvent is freshly distilled. In some embodiments, a freshly distilled anhydrous aprotic organic solvent is a basic amine solvent such as, e.g., pyridine. In some embodiments, a freshly distilled anhydrous aprotic organic solvent is an ethereal solvent such as, e.g., tetrahydrofuran. In some embodiments, a freshly distilled anhydrous aprotic organic solvent is a nitrile solvent such as, e.g., acetonitrile.

### Chiral Reagent/Chiral Auxiliary

[1307] In some embodiments, chiral reagents are used to confer stereoselectivity in the production of chirally controlled oligonucleotides. Many different chiral reagents, also referred to by those of skill in the art and herein as chiral auxiliaries, may be used in accordance with methods of the present disclosure. Examples of such chiral reagents are described herein and in Wada I, II and III, referenced above. In some embodiments of the disclosure, a chiral reagent is a compound of one of the following formulae:

[chemical structure]

[1308] As demonstrated herein, when used for preparing a chiral internucleotidic linkage, to obtain stereoselectivity generally stereochemically pure chiral reagents are utilized.

[1309] Additional chiral auxiliaries and their use can be found in e.g., Wada I (JP4348077; WO2005/014609; WO2005/092909), Wada II (WO2010/064146), Wada III (WO2012/039448), Chiral Control (WO2010/064146), etc.

### Activation

[1310] An achiral H-phosphonate moiety is treated with the first activating reagent to form the first intermediate. In one embodiment, the first activating reagent is added to the reaction mixture during the condensation step. Use of the first activating reagent is dependent on reaction conditions such as solvents that are used for the reaction. Examples of the first activating reagent are phosgene, trichloromethyl chloroformate, bis(trichloromethyl)carbonate (BTC), oxalyl chloride, Ph₃PCl₂, (PhO)₃PCl₂, N,N′-bis(2-oxo-3-oxazolidinyl)phosphinic chloride (BopCl), 1,3-dimethyl-2-(3-nitro-1,2,4-triazol-1-yl)-2-pyrrolidin-1-yl-1,3,2-diazaphospholidinium hexafluorophosphate (MNTP), or 3-nitro-1,2,4-triazol-1-yl-tris(pyrrolidin-1-yl)phosphonium hexafluorophosphate (PyNTP).

[1311] The example of achiral H-phosphonate moiety is a compound shown in the above Scheme. DBU represents 1,8-diazabicyclo[5.4.0]undec-7-ene. H⁺DBU may be, for example, ammonium ion, alkylammonium ion, heteroaromatic iminium ion, or heterocyclic iminium ion, any of which is primary, secondary, tertiary or quaternary, or a monovalent metal ion.

Reacting with Chiral Reagent

[1312] After the first activation step, the activated achiral H-phosphonate moiety reacts with a chiral reagent.

### Stereospecific Condensation Step

[1313] A chiral intermediate is treated with the second activating reagent and a nucleoside to form a condensed intermediate. The nucleoside may be on solid support. Examples of the second activating reagent are 4,5-dicyanoimidazole (DCI), 4,5-dichloroimidazole, 1-phenylimidazolium triflate (PhIMT), benzimidazolium triflate (BIT), benztriazole, 3-nitro-1,2,4-triazole (NT), tetrazole, 5-ethylthiotetrazole (ETT), 5-benzylthiotetrazole (BTT), 5-(4-nitrophenyl)tetrazole, N-cyanomethylpyrrolidinium triflate (CMPT), N-cyanomethylpiperidinium triflate, N-cyanomethyldimethylammonium triflate. A chiral intermediate of Formula Z-Va ((Z-Vb), (Z-Va′), or (Z-Vb′)) may be isolated as a monomer. Usually, the chiral intermediate of Z-Va ((Z-Vb), (Z-Va′), or (Z-Vb′)) is not isolated and undergoes a reaction in the same pot with a nucleoside or modified nucleoside to provide a chiral phosphite compound, a condensed intermediate. In other embodiments, when the method is performed via solid phase synthesis, the solid support comprising the compound is filtered away from side products, impurities, and/or reagents.

### Capping Step

[1314] If the final nucleic acid is larger than a dimer, the unreacted —OH moiety is capped with a blocking group and the chiral auxiliary in the compound may also be capped with a blocking group to form a capped condensed intermediate. If the final nucleic acid is a dimer, then the capping step is not necessary.

### Modifying Step

[1315] The compound is modified by reaction with an electrophile. The capped condensed intermediate may be executed modifying step. In some embodiments, the modifying step is performed using a sulfur electrophile, a selenium electrophile or a boronating agent. Examples of modifying steps are step of oxidation and sulfurization.

[1316] In some embodiments of the method, the sulfur electrophile is a compound having one of the following formulas:

Z^{z1}—S—S—Z^{z2}, or Z^{z1}—S-_{Vz}-Z^{z2}; S₈ (Formula Z-B),

wherein Z^{z1} and Z^{z2} are independently alkyl, aminoalkyl, cycloalkyl, heterocyclic, cycloalkylalkyl, heterocycloalkyl, aryl, heteroaryl, alkyloxy, aryloxy, heteroaryloxy, acyl, amide, imide, or thiocarbonyl, or Z^{z1} and Z^{z2} are taken together to form a 3 to 8 membered alicyclic or heterocyclic ring, which may be substituted or unsubstituted; v_{z} is SO₂, O, or NR^{f}; and R^{f} is hydrogen, alkyl, alkenyl, alkynyl, or aryl.

[1317] Additional sulfur electrophiles are known in the art.

[1318] In some embodiments, after the modifying step, a chiral auxiliary group falls off from the growing oligonucleotide chain. In some embodiments, after the modifying step, a chiral auxiliary group remains connected to the internucleotidic phosphorus atom.

[1319] In some embodiments of the method, the modifying step is an oxidation step. In some embodiments of the method, the modifying step is an oxidation step using similar conditions as described above in this application. In some embodiments, an oxidation step is as disclosed in, e.g., JP 2010-265304 A and WO2010/064146.

### Chain Elongation Cycle and De-Protection Step

[1320] The capped condensed intermediate is deblocked to remove the blocking group at the 5′-end of the growing nucleic acid chain to provide a compound. The compound is optionally allowed to re-enter the chain elongation cycle to form a condensed intermediate, a capped condensed intermediate, a modified capped condensed intermediate, and a 5′-deprotected modified capped intermediate. Following at least one round of chain elongation cycle, the 5′-deprotected modified capped intermediate is further deblocked by removal of the chiral auxiliary ligand and other protecting groups for, e.g., nucleobase, modified nucleobase, sugar and modified sugar protecting groups, to provide a nucleic acid. In other embodiments, the nucleoside comprising a 5′-OH moiety is an intermediate from a previous chain elongation cycle as described herein. In yet other embodiments, the nucleoside comprising a 5′-OH moiety is an intermediate obtained from another known nucleic acid synthetic method. In embodiments where a solid support is used, the phosphorus-atom modified nucleic acid is then cleaved from the solid support. In certain embodiments, the nucleic acids is left attached on the solid support for purification purposes and then cleaved from the solid support following purification.

[1321] In yet other embodiments, the nucleoside comprising a 5′-OH moiety is an intermediate obtained from another known nucleic acid synthetic method. In yet other embodiments, the nucleoside comprising a 5′-OH moiety is an intermediate obtained from another known nucleic acid synthetic method as described in this application. In yet other embodiments, the nucleoside comprising a 5′-OH moiety is an intermediate obtained from another known nucleic acid synthetic method comprising one or more cycles illustrated in Scheme I. In some embodiments, the present disclosure provides oligonucleotide synthesis methods that use stable and commercially available materials as starting materials. In some embodiments, the present disclosure provides oligonucleotide synthesis methods to produce stereocontrolled phosphorus atom-modified oligonucleotide derivatives using an achiral starting material.

[1322] In some embodiments, the method of the present disclosure does not cause degradations under the de-protection steps. Further the method does not require special capping agents to produce phosphorus atom-modified oligonucleotide derivatives.

### Condensing Reagent

[1323] Condensing reagents (C_{R}) useful in accordance with methods of the present disclosure are of any one of the following general formulae:

[chemical structure]

wherein Z¹, Z², Z³, Z⁴, Z⁵, Z⁶, Z⁷, Z⁸, and Z⁹ are independently optionally substituted group selected from alkyl, aminoalkyl, cycloalkyl, heterocyclic, cycloalkylalkyl, heterocycloalkyl, aryl, heteroaryl, alkyloxy, aryloxy, or heteroaryloxy, or wherein any of Z² and Z³, Z⁵ and Z⁶, Z⁷ and Z⁸, Z⁸ and Z⁹, Z⁹ and Z⁷, or Z⁷ and Z⁸ and Z⁹ are taken together to form a 3 to 20 membered alicyclic or heterocyclic ring; Q⁻ is a counter anion; and LG is a leaving group.

[1324] In some embodiments, a counter ion of a condensing reagent C_{R} is Cl⁻, Br⁻, BF₄⁻, PF₆⁻, TfO⁻, Tf₂N⁻, AsF₆⁻, ClO₄⁻, or SbF₆⁻, wherein Tf is CF₃SO₂. In some embodiments, a leaving group of a condensing reagent C_{R} is F, Cl, Br, I, 3-nitro-1,2,4-triazole, imidazole, alkyltriazole, tetrazole, pentafluorobenzene, or 1-hydroxybenzotriazole.

[1325] In some embodiments, a condensing reagent is selected from those described in WO/2006/066260.

[1326] In some embodiments, a condensing reagent is 1,3-dimethyl-2-(3-nitro-1,2,4-triazol-1-yl)-2-pyrrolidin-1-yl-1,3,2-diazaphospholidinium hexafluorophosphate (MNTP), or 3-nitro-1,2,4-triazol-1-yl-tris(pyrrolidin-1-yl)phosphonium hexafluorophosphate (PyNTP):

[chemical structure]

### Selection of Base and Sugar of Nucleoside Coupling Partner

[1327] As described herein, nucleoside coupling partners for use in accordance with methods of the present disclosure can be the same as one another or can be different from one another. In some embodiments, nucleoside coupling partners for use in the synthesis of a provided oligonucleotide are of the same structure and/or stereochemical configuration as one another. In some embodiments, each nucleoside coupling partner for use in the synthesis of a provided oligonucleotide is not of the same structure and/or stereochemical configuration as certain other nucleoside coupling partners of the oligonucleotide. Example nucleobases and sugars for use in accordance with methods of the present disclosure are described herein. One of skill in the relevant chemical and synthetic arts will recognize that any combination of nucleobases and sugars described herein are contemplated for use in accordance with methods of the present disclosure.

### Coupling Step

[1328] Example coupling procedures and chiral reagents and condensing reagents for use in accordance with the present disclosure are outlined in, inter alia, Wada I (JP4348077; WO2005/014609; WO2005/092909), Wada II (WO2010/064146), Wada III (WO2012/039448), and Chiral Control (WO2010/064146). Chiral nucleoside coupling partners for use in accordance with the present disclosure are also referred to herein as “Wada amidites.” In some embodiments, a coupling partner has the structure of

[chemical structure]

wherein B^{PRO} is a protected nucleobase. In some embodiments, a coupling partner has the structure of

[chemical structure]

wherein B^{PRO} is a protected nucleobase. In some embodiments, a coupling partner has the structure of

[chemical structure]

wherein B^{PRO} is a protected nucleobase, and R¹ is as defined and described herein. In some embodiments, a coupling partner has the structure of

[chemical structure]

wherein B^{PRO} is a protected nucleobase, and R¹ is as defined and described herein. In some embodiments, R¹ is optionally substituted C₁₋₆ alkyl. In some embodiments, R¹ is Me.

[1329] Additional examples are described in WO/2010/064146, WO/2011/005761, WO/2013/012758, WO/2014/010250, US2013/0178612, WO/2014/012081, WO/2015/107425, WO/2017/015555, and WO/2017/062862, the phosphoramidites of each of which is incorporated herein by reference.

[1330] In some embodiments, the step of coupling comprises reacting a free hydroxyl group of a nucleotide unit of an APOC3 oligonucleotide with a nucleoside coupling partner under suitable conditions to effect the coupling. In some embodiments, the step of coupling is preceded by a step of deblocking. For instance, in some embodiments, the 5′ hydroxyl group of the growing oligonucleotide is blocked (i.e., protected) and must be deblocked in order to subsequently react with a nucleoside coupling partner.

[1331] Once the appropriate hydroxyl group of the growing oligonucleotide has been deblocked, the support is washed and dried in preparation for delivery of a solution comprising a chiral reagent and a solution comprising an activator. In some embodiments, a chiral reagent and an activator are delivered simultaneously. In some embodiments, co-delivery comprises delivering an amount of a chiral reagent in solution (e.g., a phosphoramidite solution) and an amount of activator in a solution (e.g., a CMPT solution) in a polar aprotic solvent such as a nitrile solvent (e.g., acetonitrile).

[1332] In some embodiments, the step of coupling provides a crude product composition in which the chiral phosphite product is present in a diastereomeric excess of >95%. In some embodiments, the chiral phosphite product is present in a diastereomeric excess of >96%. In some embodiments, the chiral phosphite product is present in a diastereomeric excess of >97%. In some embodiments, the chiral phosphite product is present in a diastereomeric excess of >98%. In some embodiments, the chiral phosphite product is present in a diastereomeric excess of >99%.

### Capping Step:

[1333] Provided methods for making chirally controlled oligonucleotides comprise a step of capping. In some embodiments, a step of capping is a single step. In some embodiments, a step of capping is two steps. In some embodiments, a step of capping is more than two steps. In some embodiments, a step of capping comprises steps of capping the free amine of the chiral auxiliary and capping any residual unreacted 5′ hydroxyl groups. In some embodiments, the free amine of the chiral auxiliary and the unreacted 5′ hydroxyl groups are capped with the same capping group. In some embodiments, the free amine of the chiral auxiliary and the unreacted 5′ hydroxyl groups are capped with different capping groups. In certain embodiments, capping with different capping groups allows for selective removal of one capping group over the other during synthesis of the oligonucleotide. In some embodiments, the capping of both groups occurs simultaneously. In some embodiments, the capping of both groups occurs iteratively. In certain embodiments, capping occurs iteratively and comprises a first step of capping the free amine followed by a second step of capping the free 5′ hydroxyl group, wherein both the free amine and the 5′ hydroxyl group are capped with the same capping group. For instance, in some embodiments, the free amine of the chiral auxiliary is capped using an anhydride (e.g., phenoxyacetic anhydride, i.e., Pac₂O) prior to capping of the 5′ hydroxyl group with the same anhydride. In certain embodiments, the capping of the 5′ hydroxyl group with the same anhydride occurs under different conditions (e.g., in the presence of one or more additional reagents). In some embodiments, capping of the 5′ hydroxyl group occurs in the presence of an amine base in an etherial solvent (e.g., NMI (N-methylimidazole) in THF). The phrase “capping group” is used interchangeably herein with the phrases “protecting group” and “blocking group”. In some embodiments, an amine capping group is characterized in that it effectively caps the amine such that it prevents rearrangement and/or decomposition of the intermediate phosphite species. In some embodiments, a capping group is selected for its ability to protect the amine of the chiral auxiliary in order to prevent intramolecular cleavage of the internucleotide linkage phosphorus. In some embodiments, a 5′ hydroxyl group capping group is characterized in that it effectively caps the hydroxyl group such that it prevents the occurrence of “shortmers,” e.g., “n−m” (m and n are integers and m<n; n is the number of bases in the targeted oligonucleotide) impurities that occur from the reaction of an APOC3 oligonucleotide chain that fails to react in a first cycle but then reacts in one or more subsequent cycles. The presence of such shortmers, especially “n−1”, has a deleterious effect upon the purity of the crude oligonucleotide and makes final purification of the oligonucleotide tedious and generally low-yielding. In some embodiments, a particular cap is selected based on its tendency to facilitate a particular type of reaction under particular conditions. For instance, in some embodiments, a capping group is selected for its ability to facilitate an E1 elimination reaction, which reaction cleaves the cap and/or auxiliary from the growing oligonucleotide. In some embodiments, a capping group is selected for its ability to facilitate an E2 elimination reaction, which reaction cleaves the cap and/or auxiliary from the growing oligonucleotide. In some embodiments, a capping group is selected for its ability to facilitate a (3-elimination reaction, which reaction cleaves the cap and/or auxiliary from the growing oligonucleotide.

### Modifying Step:

[1334] As used herein, the phrase “modifying step”, “modification step” and “P-modification step” are used interchangeably and refer generally to any one or more steps used to install a modified internucleotidic linkage. In some embodiments, the modified internucleotidic linkage having the structure of Formula I. A P-modification step of the present disclosure occurs during assembly of a provided oligonucleotide rather than after assembly of a provided oligonucleotide is complete. Thus, each nucleotide unit of a provided oligonucleotide can be individually modified at the linkage phosphorus during the cycle within which the nucleotide unit is installed. In some embodiments, a suitable P-modification reagent is a sulfur electrophile, selenium electrophile, oxygen electrophile, boronating reagent, or an azide reagent.

[1335] For instance, in some embodiments, a selenium reagent is elemental selenium, a selenium salt, or a substituted diselenide. In some embodiments, an oxygen electrophile is elemental oxygen, peroxide, or a substituted peroxide. In some embodiments, a boronating reagent is a borane-amine (e.g., N,N-diisopropylethylamine (BH₃.DIPEA), borane-pyridine (BH₃.Py), borane-2-chloropyridine (BH₃.CPy), borane-aniline (BH₃.An)), a borane-ether reagent (e.g., borane-tetrahydrofuran (BH₃.THF)), a borane-dialkylsulfide reagent (e.g., BH₃. Me₂S), aniline-cyanoborane, or a triphenylphosphine-carboalkoxyborane. In some embodiments, an azide reagent is comprises an azide group capable of undergoing subsequent reduction to provide an amine group.

[1336] In some embodiments, a P-modification reagent is a sulfurization reagent as described herein. In some embodiments, a step of modifying comprises sulfurization of phosphorus to provide a phosphorothioate linkage or phosphorothioate triester linkage. In some embodiments, a step of modifying provides an APOC3 oligonucleotide having an internucleotidic linkage of Formula I.

[1337] In some embodiments, the present disclosure provides sulfurizing reagents, and methods of making, and use of the same.

[1338] In some embodiments, such sulfurizing reagents are thiosulfonate reagents.

[1339] Various sulfurizing reagents and thiosulfonate reagents are known in the art.

[1340] In some embodiments, a sulfurization reagent for use in accordance with the present disclosure is characterized in that the moiety transferred to phosphorus during sulfurization is a substituted sulfur (e.g., —SR) as opposed to a single sulfur atom (e.g., —S⁻ or ═S).

[1341] In some embodiments, a sulfurization reagent for use in accordance with the present disclosure is characterized in that the activity of the reagent is tunable by modifying the reagent with a certain electron withdrawing or donating group.

[1342] In some embodiments, a sulfurization reagent for use in accordance with the present disclosure is characterized in that it is crystalline. In some embodiments, a sulfurization reagent for use in accordance with the present disclosure is characterized in that it has a high degree of crystallinity. In certain embodiments, a sulfurization reagent for use in accordance with the present disclosure is characterized by ease of purification of the reagent via, e.g., recrystallization. In certain embodiments, a sulfurization reagent for use in accordance with the present disclosure is characterized in that it is substantially free from sulfur-containing impurities. In some embodiments, sulfurization reagents which are substantially free from sulfur-containing impurities show increased efficiency.

[1343] In some embodiments, the provided chirally controlled oligonucleotide comprises one or more phosphate diester linkages. To synthesize such chirally controlled oligonucleotides, one or more modifying steps are optionally replaced with an oxidation step to install the corresponding phosphate diester linkages. In some embodiments, the oxidation step is performed in a fashion similar to ordinary oligonucleotide synthesis. In some embodiments, an oxidation step comprises the use of 12. In some embodiments, an oxidation step comprises the use of I₂ and pyridine. In some embodiments, an oxidation step comprises the use of 0.02 M I₂ in a THF/pyridine/water (70:20:10—v/v/v) co-solvent system. An example cycle is depicted in Scheme I-c.

[1344] In some embodiments, a phosphorothioate is directly formed through sulfurization by a sulfurization reagents, e.g., 3-phenyl-1,2,4-dithiazolin-5-one. In some embodiments, after a direct installation of a phosphorothioate, a chiral auxiliary group remains attached to the internucleotidic phosphorus atom. In some embodiments, an additional de-protecting step is required to remove the chiral auxiliary (e.g., for DPSE-type chiral auxiliary, using TBAF, HF-Et₃N, etc.).

[1345] In some embodiments, a phosphorothioate precursor is used to synthesize chirally controlled oligonucleotides comprising phosphorothioate linkages.

[1346] In some embodiments, the provided chirally controlled oligonucleotide comprises one or more phosphate diester linkages and one or more phosphorothioate diester linkages. In some embodiments, the provided chirally controlled oligonucleotide comprises one or more phosphate diester linkages and one or more phosphorothioate diester linkages, wherein at least one phosphate diester linkage is installed after all the phosphorothioate diester linkages when synthesized from 3′ to 5′. To synthesize such chirally controlled oligonucleotides, in some embodiments, one or more modifying steps are optionally replaced with an oxidation step to install the corresponding phosphate diester linkages, and a phosphorothioate precursor is installed for each of the phosphorothioate diester linkages. In some embodiments, a phosphorothioate precursor is converted to a phosphorothioate diester linkage after the desired oligonucleotide length is achieved. In some embodiments, the deprotection/release step during or after cycle exit converts the phosphorothioate precursors into phosphorothioate diester linkages.

[1347] In some embodiments, a phosphorothioate precursor is a phosphorus protecting group as described herein, e.g., 2-cyanoethyl (CE or Cne), 2-trimethylsilylethyl, 2-nitroethyl, 2-sulfonylethyl, methyl, benzyl, o-nitrobenzyl, 2-(p-nitrophenyl)ethyl (NPE or Npe), 2-phenylethyl, 3-(N-tert-butylcarboxamido)-1-propyl, 4-oxopentyl, 4-methylthio-1-butyl, 2-cyano-1,1-dimethylethyl, 4-N-methylaminobutyl, 3-(2-pyridyl)-1-propyl, 2-[N-methyl-N-(2-pyridyl)]aminoethyl, 2-(N-formyl,N-methyl)aminoethyl, 4-[N-methyl-N-(2,2,2-trifluoroacetyl)amino]butyl. Examples are further depicted below.

[1348] As noted above, in some embodiments, sulfurization occurs under conditions which cleave the chiral reagent from the growing oligonucleotide. In some embodiments, sulfurization occurs under conditions which do not cleave the chiral reagent from the growing oligonucleotide.

[1349] In some embodiments, a sulfurization reagent is dissolved in a suitable solvent and delivered to the column. In certain embodiments, the solvent is a polar aprotic solvent such as a nitrile solvent. In some embodiments, the solvent is acetonitrile. In some embodiments, a solution of sulfurization reagent is prepared by mixing a sulfurization reagent (e.g., a thiosulfonate derivative as described herein) with BSTFA (N,O-bis-trimethylsilyl-trifluoroacetamide) in a nitrile solvent (e.g., acetonitrile). In some embodiments, BSTFA is not included. For example, the present inventors have found that relatively more reactive sulfurization reagents of general formula R^{s2}—S—S(O)₂—R^{s3} can often successfully participate in sulfurization reactions in the absence of BSTFA. To give but one example, the inventors have demonstrated that where R^{s2} is p-nitrophenyl and R^{s3} is methyl then no BSTFA is required. In light of this disclosure, those skilled in the art will readily be able to determine other situations and/or sulfurization reagents that do not require BSTFA.

[1350] In some embodiments, the sulfurization step is performed at room temperature. In some embodiments, the sulfurization step is performed at lower temperatures such as about 0° C., about 5° C., about 10° C., or about 15° C. In some embodiments, the sulfurization step is performed at elevated temperatures of greater than about 20° C.

[1351] In some embodiments, a sulfurization reaction is run for about 1 minute to about 120 minutes. In some embodiments, a sulfurization reaction is run for about 1 minute to about 90 minutes. In some embodiments, a sulfurization reaction is run for about 1 minute to about 60 minutes. In some embodiments, a sulfurization reaction is run for about 1 minute to about 30 minutes. In some embodiments, a sulfurization reaction is run for about 1 minute to about 25 minutes. In some embodiments, a sulfurization reaction is run for about 1 minute to about 20 minutes. In some embodiments, a sulfurization reaction is run for about 1 minute to about 15 minutes. In some embodiments, a sulfurization reaction is run for about 1 minute to about 10 minutes. In some embodiments, a sulfurization reaction is run for about 5 minute to about 60 minutes.

[1352] In some embodiments, a sulfurization reaction is run for about 5 minutes. In some embodiments, a sulfurization reaction is run for about 10 minutes. In some embodiments, a sulfurization reaction is run for about 15 minutes. In some embodiments, a sulfurization reaction is run for about 20 minutes. In some embodiments, a sulfurization reaction is run for about 25 minutes. In some embodiments, a sulfurization reaction is run for about 30 minutes. In some embodiments, a sulfurization reaction is run for about 35 minutes. In some embodiments, a sulfurization reaction is run for about 40 minutes. In some embodiments, a sulfurization reaction is run for about 45 minutes. In some embodiments, a sulfurization reaction is run for about 50 minutes. In some embodiments, a sulfurization reaction is run for about 55 minutes. In some embodiments, a sulfurization reaction is run for about 60 minutes.

[1353] It was unexpectedly found that certain of the sulfurization modification products made in accordance with methods of the present disclosure are unexpectedly stable. In some embodiments, it the unexpectedly stable products are phosphorothioate triesters. In some embodiments, the unexpectedly stable products are chirally controlled oligonucleotides comprising one or more internucleotidic linkages having the structure of Formula I-c.

[1354] One of skill in the relevant arts will recognize that sulfurization methods described herein and sulfurization reagents described herein are also useful in the context of modifying H-phosphonate oligonucleotides such as those described in Wada II (WO2010/064146).

[1355] In some embodiments, the sulfurization reaction has a stepwise sulfurization efficiency that is at least about 80%, 85%, 90%, 95%, 96%, 97%, or 98%. In some embodiments, the sulfurization reaction provides a crude dinucleotide product composition that is at least 98% pure. In some embodiments, the sulfurization reaction provides a crude tetranucleotide product composition that is at least 90% pure. In some embodiments, the sulfurization reaction provides a crude dodecanucleotide product composition that is at least 70% pure. In some embodiments, the sulfurization reaction provides a crude icosanucleotide product composition that is at least 50% pure.

[1356] Once the step of modifying the linkage phosphorus is complete, the oligonucleotide undergoes another deblock step in preparation for re-entering the cycle. In some embodiments, a chiral auxiliary remains intact after sulfurization and is deblocked during the subsequent deblock step, which necessarily occurs prior to re-entering the cycle. The process of deblocking, coupling, capping, and modifying, are repeated until the growing oligonucleotide reaches a desired length, at which point the oligonucleotide can either be immediately cleaved from the solid support or left attached to the support for purification purposes and later cleaved. In some embodiments, one or more protecting groups are present on one or more of the nucleotide bases, and cleavage of the oligonucleotide from the support and deprotection of the bases occurs in a single step. In some embodiments, one or more protecting groups are present on one or more of the nucleotide bases, and cleavage of the oligonucleotide from the support and deprotection of the bases occurs in more than one step. In some embodiments, deprotection and cleavage from the support occurs under basic conditions using, e.g., one or more amine bases. In certain embodiments, the one or more amine bases comprise propyl amine. In certain embodiments, the one or more amine bases comprise pyridine.

[1357] In some embodiments, cleavage from the support and/or deprotection occurs at elevated temperatures of about 30° C. to about 90° C. In some embodiments, cleavage from the support and/or deprotection occurs at elevated temperatures of about 40° C. to about 80° C. In some embodiments, cleavage from the support and/or deprotection occurs at elevated temperatures of about 50° C. to about 70° C. In some embodiments, cleavage from the support and/or deprotection occurs at elevated temperatures of about 60° C. In some embodiments, cleavage from the support and/or deprotection occurs at ambient temperatures.

[1358] Example purification procedures are described herein and/or are known generally in the relevant arts.

[1359] Noteworthy is that the removal of the chiral auxiliary from the growing oligonucleotide during each cycle is beneficial for at least the reasons that (1) the auxiliary will not have to be removed in a separate step at the end of the oligonucleotide synthesis when potentially sensitive functional groups are installed on phosphorus; and (2) unstable phosphorus-auxiliary intermediates prone to undergoing side reactions and/or interfering with subsequent chemistry are avoided. Thus, removal of the chiral auxiliary during each cycle makes the overall synthesis more efficient.

[1360] While the step of deblocking in the context of the cycle is described above, additional general methods are included below.

### Deblocking Step

[1361] In some embodiments, the step of coupling is preceded by a step of deblocking. For instance, in some embodiments, the 5′ hydroxyl group of the growing oligonucleotide is blocked (i.e., protected) and must be deblocked in order to subsequently react with a nucleoside coupling partner.

[1362] In some embodiments, acidification is used to remove a blocking group. In some embodiments, the acid is a Brønsted acid or Lewis acid. Useful Brønsted acids are carboxylic acids, alkylsulfonic acids, arylsulfonic acids, phosphoric acid and its derivatives, phosphonic acid and its derivatives, alkylphosphonic acids and their derivatives, arylphosphonic acids and their derivatives, phosphinic acid, dialkylphosphinic acids, and diarylphosphinic acids which have a pKa (25° C. in water) value of −0.6 (trifluoroacetic acid) to 4.76 (acetic acid) in an organic solvent or water (in the case of 80% acetic acid). The concentration of the acid (1 to 80%) used in the acidification step depends on the acidity of the acid. Consideration to the acid strength must be taken into account as strong acid conditions will result in depurination/depyrimidination, wherein purinyl or pyrimidinyl bases are cleaved from ribose ring and or other sugar ring. In some embodiments, an acid is selected from R^{a1}COOH, R^{a1}SO₃H, R^{a3}SO₃H,

[chemical structure]

wherein each of R^{a1} and R^{a2} is independently hydrogen or an optionally substituted alkyl or aryl, and R^{a3} is an optionally substituted alkyl or aryl.

[1363] In some embodiments, acidification is accomplished by a Lewis acid in an organic solvent. Examples of such useful Lewis acids are Zn(X^{a})₂ wherein X^{a} is Cl, Br, I, or CF₃SO₃.

[1364] In some embodiments, the step of acidifying comprises adding an amount of a Brønsted or Lewis acid effective to remove a blocking group without removing purine moieties from the condensed intermediate.

[1365] Acids that are useful in the acidifying step also include, but are not limited to 10% phosphoric acid in an organic solvent, 10% hydrochloric acid in an organic solvent, 1% trifluoroacetic acid in an organic solvent, 3% dichloroacetic acid or trichloroacetic acid in an organic solvent or 80% acetic acid in water. The concentration of any Brønsted or Lewis acid used in this step is selected such that the concentration of the acid does not exceed a concentration that causes cleavage of a nucleobase from a sugar moiety.

[1366] In some embodiments, acidification comprises adding 1% trifluoroacetic acid in an organic solvent. In some embodiments, acidification comprises adding about 0.1% to about 8% trifluoroacetic acid in an organic solvent. In some embodiments, acidification comprises adding 3% dichloroacetic acid or trichloroacetic acid in an organic solvent. In some embodiments, acidification comprises adding about 0.1% to about 10% dichloroacetic acid or trichloroacetic acid in an organic solvent. In some embodiments, acidification comprises adding 3% trichloroacetic acid in an organic solvent. In some embodiments, acidification comprises adding about 0.1% to about 10% trichloroacetic acid in an organic solvent. In some embodiments, acidification comprises adding 80% acetic acid in water. In some embodiments, acidification comprises adding about 50% to about 90%, or about 50% to about 80%, about 50% to about 70%, about 50% to about 60%, about 70% to about 90% acetic acid in water. In some embodiments, the acidification comprises the further addition of cation scavengers to an acidic solvent. In certain embodiments, the cation scavengers can be triethylsilane or triisopropylsilane. In some embodiments, a blocking group is deblocked by acidification, which comprises adding 1% trifluoroacetic acid in an organic solvent. In some embodiments, a blocking group is deblocked by acidification, which comprises adding 3% dichloroacetic acid in an organic solvent. In some embodiments, a blocking group is deblocked by acidification, which comprises adding 3% trichloroacetic acid in an organic solvent. In some embodiments, a blocking group is deblocked by acidification, which comprises adding 3% trichloroacetic acid in dichloromethane.

[1367] In certain embodiments, methods of the present disclosure are completed on a synthesizer and the step of deblocking the hydroxyl group of the growing oligonucleotide comprises delivering an amount solvent to the synthesizer column, which column contains a solid support to which the oligonucleotide is attached. In some embodiments, the solvent is a halogenated solvent (e.g., dichloromethane). In certain embodiments, the solvent comprises an amount of an acid. In some embodiments, the solvent comprises an amount of an organic acid such as, for instance, trichloroacetic acid. In certain embodiments, the acid is present in an amount of about 1% to about 20% w/v. In certain embodiments, the acid is present in an amount of about 1% to about 10% w/v. In certain embodiments, the acid is present in an amount of about 1% to about 5% w/v. In certain embodiments, the acid is present in an amount of about 1 to about 3% w/v. In certain embodiments, the acid is present in an amount of about 3% w/v. Methods for deblocking a hydroxyl group are described further herein. In some embodiments, the acid is present in 3% w/v is dichloromethane.

[1368] In some embodiments, the chiral auxiliary is removed before the deblocking step. In some embodiments, the chiral auxiliary is removed during the deblocking step.

[1369] In some embodiments, cycle exit is performed before the deblocking step. In some embodiments, cycle exit is preformed after the deblocking step.

### General Conditions for Blocking Group/Protecting Group Removal

[1370] Functional groups such as hydroxyl or amino moieties which are located on nucleobases or sugar moieties are routinely blocked with blocking (protecting) groups (moieties) during synthesis and subsequently deblocked. In general, a blocking group renders a chemical functionality of a molecule inert to specific reaction conditions and can later be removed from such functionality in a molecule without substantially damaging the remainder of the molecule (see e.g., Green and Wuts, Protective Groups in Organic Synthesis, 2nd Ed., John Wiley & Sons, New York, 1991). For example, amino groups can be blocked with nitrogen blocking groups. Chemical functional groups can also be blocked by including them in a precursor form. Thus an azido group can be considered a blocked form of an amine as the azido group is easily converted to the amine. Further representative protecting groups utilized in nucleic acid synthesis are known (see e.g. Agrawal et al., Protocols for Oligonucleotide Conjugates, Eds., Humana Press, New Jersey, 1994, Vol. 26, pp. 1-72).

[1371] Various methods are known and used for removal of blocking groups from nucleic acids. In some embodiments, all blocking groups are removed. In some embodiments, a portion of blocking groups are removed. In some embodiments, reaction conditions can be adjusted to selectively remove certain blocking groups.

[1372] In some embodiments, nucleobase blocking groups, if present, are cleavable with an acidic reagent after the assembly of a provided oligonucleotide. In some embodiment, nucleobase blocking groups, if present, are cleavable under neither acidic nor basic conditions, e.g. cleavable with fluoride salts or hydrofluoric acid complexes. In some embodiments, nucleobase blocking groups, if present, are cleavable in the presence of base or a basic solvent after the assembly of a provided oligonucleotide. In certain embodiments, one or more of the nucleobase blocking groups are characterized in that they are cleavable in the presence of base or a basic solvent after the assembly of a provided oligonucleotide but are stable to the particular conditions of one or more earlier deprotection steps occurring during the assembly of the provided oligonucleotide.

[1373] In some embodiments, blocking groups for nucleobases are not required. In some embodiments, blocking groups for nucleobases are required. In some embodiments, certain nucleobases require one or more blocking groups while other nucleobases do not require one or more blocking groups.

[1374] In some embodiments, the oligonucleotide is cleaved from the solid support after synthesis. In some embodiments, cleavage from the solid support comprises the use of propylamine. In some embodiments, cleavage from the solid support comprises the use of propylamine in pyridine. In some embodiments, cleavage from the solid support comprises the use of 20% propylamine in pyridine. In some embodiments, cleavage from the solid support comprises the use of propylamine in anhydrous pyridine. In some embodiments, cleavage from the solid support comprises the use of 20% propylamine in anhydrous pyridine. In some embodiments, cleavage from the solid support comprises use of a polar aprotic solvent such as acetonitrile, NMP, DMSO, sulfone, and/or lutidine. In some embodiments, cleavage from the solid support comprises use of solvent, e.g., a polar aprotic solvent, and one or more primary amines (e.g., a C₁₋₁₀ amine), and/or one or more of methoxylamine, hydrazine, and pure anhydrous ammonia.

[1375] In some embodiments, deprotection of oligonucleotide comprises the use of propylamine. In some embodiments, deprotection of oligonucleotide comprises the use of propylamine in pyridine. In some embodiments, deprotection of oligonucleotide comprises the use of 20% propylamine in pyridine. In some embodiments deprotection of oligonucleotide comprises the use of propylamine in anhydrous pyridine. In some embodiments, deprotection of oligonucleotide comprises the use of 20% propylamine in anhydrous pyridine.

[1376] In some embodiments, the oligonucleotide is deprotected during cleavage.

[1377] In some embodiments, cleavage of oligonucleotide from solid support, or deprotection of oligonucleotide, is performed at about room temperature. In some embodiments, cleavage of oligonucleotide from solid support, or deprotection of oligonucleotide, is performed at elevated temperature. In some embodiments, cleavage of oligonucleotide from solid support, or deprotection of oligonucleotide, is performed at above about 30° C., 40° C., 50° C., 60° C., 70° C., 80° C. 90° C. or 100° C. In some embodiments, cleavage of oligonucleotide from solid support, or deprotection of oligonucleotide, is performed at about 30° C., 40° C., 50° C., 60° C., 70° C., 80° C. 90° C. or 100° C. In some embodiments, cleavage of oligonucleotide from solid support, or deprotection of oligonucleotide, is performed at about 40-80° C. In some embodiments, cleavage of oligonucleotide from solid support, or deprotection of oligonucleotide, is performed at about 50-70° C. In some embodiments, cleavage of oligonucleotide from solid support, or deprotection of oligonucleotide, is performed at about 60° C.

[1378] In some embodiments, cleavage of oligonucleotide from solid support, or deprotection of oligonucleotide, is performed for more than 0.1 hr, 1 hr, 2 hrs, 5 hrs, 10 hrs, 15 hrs, 20 hrs, 24 hrs, 30 hrs, or 40 hrs. In some embodiments, cleavage of oligonucleotide from solid support, or deprotection of oligonucleotide, is performed for about 0.1-5 hrs. In some embodiments, cleavage of oligonucleotide from solid support, or deprotection of oligonucleotide, is performed for about 3-10 hrs. In some embodiments, cleavage of oligonucleotide from solid support, or deprotection of oligonucleotide, is performed for about 5-15 hrs. In some embodiments, cleavage of oligonucleotide from solid support, or deprotection of oligonucleotide, is performed for about 10-20 hrs. In some embodiments, cleavage of oligonucleotide from solid support, or deprotection of oligonucleotide, is performed for about 15-25 hrs. In some embodiments, cleavage of oligonucleotide from solid support, or deprotection of oligonucleotide, is performed for about 20-40 hrs. In some embodiments, cleavage of oligonucleotide from solid support, or deprotection of oligonucleotide, is performed for about 2 hrs. In some embodiments, cleavage of oligonucleotide from solid support, or deprotection of oligonucleotide, is performed for about 5 hrs. In some embodiments, cleavage of oligonucleotide from solid support, or deprotection of oligonucleotide, is performed for about 10 hrs. In some embodiments, cleavage of oligonucleotide from solid support, or deprotection of oligonucleotide, is performed for about 15 hrs. In some embodiments, cleavage of oligonucleotide from solid support, or deprotection of oligonucleotide, is performed for about 18 hrs. In some embodiments, cleavage of oligonucleotide from solid support, or deprotection of oligonucleotide, is performed for about 24 hrs.

[1379] In some embodiments, cleavage of oligonucleotide from solid support, or deprotection of oligonucleotide, is performed at room temperature for more than 0.1 hr, 1 hr, 2 hrs, 5 hrs, 10 hrs, 15 hrs, 20 hrs, 24 hrs, 30 hrs, or 40 hrs. In some embodiments, cleavage of oligonucleotide from solid support, or deprotection of oligonucleotide, is performed at room temperature for about 5-48 hrs. In some embodiments, cleavage of oligonucleotide from solid support, or deprotection of oligonucleotide, is performed at room temperature for about 10-24 hrs. In some embodiments, cleavage of oligonucleotide from solid support, or deprotection of oligonucleotide, is performed at room temperature for about 18 hrs. In some embodiments, cleavage of oligonucleotide from solid support, or deprotection of oligonucleotide, is performed at elevated temperature for more than 0.1 hr, 1 hr, 2 hrs, 5 hrs, 10 hrs, 15 hrs, 20 hrs, 24 hrs, 30 hrs, or 40 hrs. In some embodiments, cleavage of oligonucleotide from solid support, or deprotection of oligonucleotide, is performed at elevated temperature for about 0.5-5 hrs. In some embodiments, cleavage of oligonucleotide from solid support, or deprotection of oligonucleotide, is performed at about 60° C. for about 0.5-5 hrs. In some embodiments, cleavage of oligonucleotide from solid support, or deprotection of oligonucleotide, is performed at about 60° C. for about 2 hrs.

[1380] In some embodiments, cleavage of oligonucleotide from solid support, or deprotection of oligonucleotide comprises the use of propylamine and is performed at room temperature or elevated temperature for more than 0.1 hr, 1 hr, 2 hrs, 5 hrs, 10 hrs, 15 hrs, 20 hrs, 24 hrs, 30 hrs, or 40 hrs. Example conditions are 20% propylamine in pyridine at room temperature for about 18 hrs, and 20% propylamine in pyridine at 60° C. for about 18 hrs.

[1381] In some embodiments, prior to cleavage from solid support, a step is performed to remove a chiral auxiliary group, if one is still attached to an internucleotidic phosphorus atom. In some embodiments, for example, one or more DPSE type chiral auxiliary groups remain attached to internucleotidic phosphorus atoms during the oligonucleotide synthesis cycle. Suitable conditions for removing remaining chiral auxiliary groups are widely known in the art, e.g., those described in Wada I, Wada II, Wada III, Chiral Control, etc. In some embodiments, a condition for removing DPSE type chiral auxiliary is TBAF or HF-Et₃N, e.g., 0.1M TBAF in MeCN, 0.5M HF-Et₃N in THF or MeCN, etc. In some embodiments, the present disclosure recognizes that a linker may be cleaved during the process of removing a chiral auxiliary group. In some embodiments, the present disclosure provides linkers, such as the SP linker, that provides better stability during chiral auxiliary group removal. Among other things, certain linkers provided by the present disclosure provided improved yield and/or purity.

[1382] In some embodiments, an example cycle is depicted in Scheme I.

[chemical structure]

[1383] In some embodiments, X is H or a 2′-modification. In some embodiments, X is H or —OR¹, wherein R¹ is not hydrogen. In some embodiments, X is H or —OR¹, wherein R¹ is optionally substituted C₁₋₆ alkyl. In some embodiments, X is H. In some embodiments, X is —OMe. In some embodiments, X is —OCH₂CH₂OCH₃. In some embodiments, X is —F.

[1384] It is understood by a person having ordinary skill in the art that different types of cycles may be combined to provide complete control of the chemical modifications and stereochemistry of oligonucleotides. In some embodiments, for example, an APOC3 oligonucleotide synthesis process may contain one or more Cycles. In some embodiments, a provided method comprises at least one cycle using a DPSE-type chiral auxiliary.

[1385] In some embodiments, the present disclosure provides methods for preparing provided oligonucleotide and oligonucleotide compositions. In some embodiments, a provided method comprises the step of providing a provided chiral reagent having the structure of

[chemical structure]

wherein W¹ is —NG⁵, W² is O, each of G¹ and G³ is independently hydrogen or an optionally substituted group selected from C₁₋₁₀ aliphatic, heterocyclyl, heteroaryl and aryl, G² is —C(R)₂Si(R)₃, and G⁴ and G⁵ are taken together to form an optionally substituted saturated, partially unsaturated or unsaturated heteroatom-containing ring of up to about 20 ring atoms which is monocyclic or polycyclic, fused or unfused, wherein each R is independently hydrogen, or an optionally substituted group selected from C₁-C₆ aliphatic, carbocyclyl, aryl, heteroaryl, and heterocyclyl. In some embodiments, a provided chiral reagent has the structure of

[chemical structure]

In some embodiments, a provided methods comprises providing a phosphoramidite comprising a moiety from a chiral reagent having the structure of

[chemical structure]

wherein —W¹H and —W²H, or the hydroxyl and amino groups, form bonds with the phosphorus atom of the phosphoramidite. In some embodiments, —W¹H and —W²H, or the hydroxyl and amino groups, form bonds with the phosphorus atom of the phosphoramidite, e.g., in

[chemical structure]

In some embodiments, a phosphoramidite has the structure of

[chemical structure]

[chemical structure]

[chemical structure]

In some embodiments, R is a protection group. In some embodiments, R is DMTr. In some embodiments, G² is —C(R)₂Si(R)₃, wherein —C(R)₂— is optionally substituted —CH₂—, and each R of —Si(R)₃ is independently an optionally substituted group selected from C₁₋₁₀ aliphatic, heterocyclyl, heteroaryl and aryl. In some embodiments, at least one R of —Si(R)₃ is independently optionally substituted C₁₋₁₀ alkyl. In some embodiments, at least one R of —Si(R)₃ is independently optionally substituted phenyl. In some embodiments, one R of —Si(R)₃ is independently optionally substituted phenyl, and each of the other two R is independently optionally substituted C₁₋₁₀ alkyl. In some embodiments, one R of —Si(R)₃ is independently optionally substituted C₁₋₁₀ alkyl, and each of the other two R is independently optionally substituted phenyl. In some embodiments, G² is optionally substituted —CH₂Si(Ph)(Me)₂. In some embodiments, G² is optionally substituted —CH₂Si(Me)(Ph)₂. In some embodiments, G² is —CH₂Si(Me)(Ph)₂. In some embodiments, G⁴ and G⁵ are taken together to form an optionally substituted saturated 5-6 membered ring containing one nitrogen atom (to which G⁵ is attached). In some embodiments, G⁴ and G⁵ are taken together to form an optionally substituted saturated 5-membered ring containing one nitrogen atom. In some embodiments, G¹ is hydrogen. In some embodiments, G³ is hydrogen. In some embodiments, both G¹ and G³ are hydrogen. In some embodiments, both G¹ and G³ are hydrogen, G² is —C(R)₂Si(R)₃, wherein —C(R)₂— is optionally substituted —CH₂—, and each R of —Si(R)₃ is independently an optionally substituted group selected from C₁₋₁₀ aliphatic, heterocyclyl, heteroaryl and aryl, and G⁴ and G⁵ are taken together to form an optionally substituted saturated 5-membered ring containing one nitrogen atom. In some embodiments, a provided method further comprises providing a fluoro-containing reagent. In some embodiments, a provided fluoro-containing reagent removes a chiral reagent, or a product formed from a chiral reagent, from oligonucleotides after synthesis. Various known fluoro-containing reagents, including those F⁻sources for removing —SiR₃ groups, can be utilized in accordance with the present disclosure, for example, TBAF, HF₃-Et₃N etc. In some embodiments, a fluoro-containing reagent provides better results, for example, shorter treatment time, lower temperature, less de-sulfurization, etc, compared to traditional methods, such as concentrated ammonia. In some embodiments, for certain fluoro-containing reagent, the present disclosure provides linkers for improved results, for example, less cleavage of oligonucleotides from support during removal of chiral reagent (or product formed therefrom during oligonucleotide synthesis). In some embodiments, a provided linker is an SP linker. In some embodiments, the present disclosure demonstrated that a HF-base complex can be utilized, such as HF—NR³, to control cleavage during removal of chiral reagent (or product formed therefrom during oligonucleotide synthesis). In some embodiments, HF—NR³ is HF-NEt₃. In some embodiments, HF—NR₃ enables use of traditional linkers, e.g., succinyl linker.

[1386] In some embodiments, a method for production of an APOC3 oligonucleotide comprises at least one cycle using a DPSE-type chiral auxiliary, such as that shown in the following non-limiting example:

[chemical structure]

[1387] Detritylation:

[1388] The synthesis of an oligonucleotide started with 2′-F-U-DMTr loaded CPG solid support (3% dichloroacetic acid (DCA) in toluene was used for the removal of dimethoxy trityl group (DMTr) from the initial nucleobase attached on the solid support followed by an UV watch command mode at the wavelength of 436 nm. Linear flowrate, 424 cm/hr, used for detritylation.

[1389] Coupling:

[1390] For the coupling step, all amidites were dissolved either in acetonitrile (ACN) or in 20% isobutyronitrile (IBN)/ACN at a concentration of 0.2M; the solutions were dried over molecular sieves (3 Å) NLT 4h before use (10%, v/v). Dual activators (CMIMT and ETT) coupling approach were utilized for the manufacture of an oligonucleotide. Both activators were dissolved in ACN at a concentration of 0.6M. CMIMT has been used for the efficient coupling of stereo defined nucleotides and ETT is an activator used for the coupling of random/standard amidites/nucleotides. 2.5 equivalent of amidites used for coupling of stereo defined nucleotide over 10 min recycle time (linear recycle mode, 212 cm/hr). The molar ratio of CMIMT activator to stereo defined amidite was maintained at 6.1:1 (CMIMT/Amidite=6.1/1) in the coupling step. All random amidites were coupled for 8 min with ETT activator. The molar ratio of ETT to random/standard amidites was 4.5:1.

[1391] Cap 1:

[1392] Cap 1 is a step that is performed before thiolation. 1-1.5 CV Cap B solution is used over 4 min contact time for capping of the auxiliary amine on DPSE. Capping of DPSE chiral auxiliary with Cap B solution helps to reduce the content of early failure and post FLP impurities.

[1393] Thiolation:

[1394] Following the Cap 1 step, the phosphorous triester linkages, P(III), were stabilized with thiolating reagent, 0.2M xanthane hydride (XH) in pyridine, (0.6 CV) over 6 min contact time to form a stable P(V) bond.

[1395] Oxidation:

[1396] It is noted here that the Cap 1 step is not necessary for standard nucleotide cycle.

[1397] So, after coupling of standard nucleotides onto the solid support, the phosphorous triester linkages, P(III), were oxidized with 0.05M of iodine/water/pyridine solution (3.5 eq.) over 2 min contact time to form a stable P(V) bond.

[1398] Cap 2 (Post-Thio/Ox-Capping):

[1399] In general, 97-100% coupling efficiency was observed in the coupling step based on DMTr release cation. Residual uncoupled hydroxyl groups, typically 1-3% by detrit monitor, on the solid support were blocked with Cap A and Cap B solution using 0.4 CV over 0.8 min to prevent formation of deletion sequences. In case, any auxiliary amine remained un-capped in the pre-capping step will also be capped in this step.

[1400] Cycle Repeated

[1401] The synthetic cycle (DPSE cycle=Detritylation->Coupling->Cap 1->Thiolation->Cap2 and Standard cycle=Detritylation->Coupling->Oxidation->Cap2) was repeated until the desired length of oligonucleotide synthesized on the solid support.

[1402] In some embodiments, the present disclosure comprises a method for manufacturing an APOC3 oligonucleotide composition directed to a selected target sequence, the method comprising manufacturing a provided oligonucleotide composition capable of directing single-stranded RNA interference and comprising a first plurality of oligonucleotides, each of which has a base sequence complementary to the target sequence. In some embodiments, a provided method further comprises providing a pharmaceutically acceptable carrier.

[1403] As appreciated by a person having ordinary skill in the art, provided oligonucleotides can also be prepared through known solution phase synthesis using provided reagents and methods in accordance with the present disclosure.

[1404] As non-limiting examples, provided oligonucleotides can also be prepared through any process known in the art, including but not limited to, those described in: JP 4348044; WO2005092909; U.S. Pat. No. 9,394,333; WO2011005761; U.S. Pat. Nos. 8,470,987; 8,859,755; 8,822,671; WO2013012758; EP 13817386; WO2014012081; WO2015107425; WO2017015555; and WO2017062862.

[1405] Double-Stranded Oligonucleotides Comprising a Single-Stranded Oligonucleotide Disclosed Herein

[1406] In some embodiments, an APOC3 oligonucleotide is a single-stranded or double-stranded oligonucleotide. In some embodiments, the disclosure encompasses a double-stranded oligonucleotide or molecule comprising a single-stranded oligonucleotide as disclosed herein, and another oligonucleotide which is at least partially complementary to it. In some embodiments, the present disclosure pertains to compositions comprising such a double-stranded oligonucleotide.

[1407] In some embodiments, the disclosure encompasses a double-stranded molecule comprising a single-stranded oligonucleotide as disclosed herein, and another oligonucleotide which is at least partially complementary to it, e.g., one or both ends of the molecule has a 3′ or 5′ overhang.

[1408] In some embodiments, the disclosure encompasses a double-stranded molecule comprising a single-stranded oligonucleotide as disclosed herein, and another oligonucleotide which is fully complementary to it.

[1409] In some embodiments, the disclosure encompasses a double-stranded molecule capable of directing RNA interference comprising a single-stranded oligonucleotide as disclosed herein, and another oligonucleotide which is at least partially complementary to it.

[1410] In some embodiments, the disclosure encompasses a double-stranded molecule capable of directing RNA interference comprising a single-stranded oligonucleotide as disclosed herein, and another oligonucleotide which is at least partially complementary to it, e.g., one or both ends of the molecule capable of directing RNA interference has a 3′ or 5′ overhang.

[1411] In some embodiments, the disclosure encompasses a double-stranded molecule capable of directing RNA interference comprising a single-stranded oligonucleotide as disclosed herein, and another oligonucleotide which is fully complementary to it.

[1412] In some embodiments, the disclosure encompasses a double-stranded molecule capable of directing RNA interference and RNase H-mediated knockdown comprising a single-stranded oligonucleotide as disclosed herein, and another oligonucleotide which is at least partially complementary to it.

[1413] In some embodiments, the disclosure encompasses a double-stranded molecule capable of directing RNA interference and RNase H-mediated knockdown comprising a single-stranded oligonucleotide as disclosed herein, and another oligonucleotide which is at least partially complementary to it, e.g., one or both ends of the molecule capable of directing RNA interference and RNase H-mediated knockdown has a 3′ or 5′ overhang.

[1414] In some embodiments, the disclosure encompasses a double-stranded molecule capable of directing RNA interference and RNase H-mediated knockdown comprising a single-stranded oligonucleotide as disclosed herein, and another oligonucleotide which is fully complementary to it.

[1415] Provided first oligonucleotides and oligonucleotide compositions can have any format, structural element or base sequence of any oligonucleotide disclosed herein, and further comprise a second oligonucleotide or oligonucleotide strand at least partially complementary to the first oligonucleotide. In some embodiments, the first and/or second oligonucleotide can comprise any format, structural element or base sequence of (or a base sequence at least partially complementary to a base sequence of) any oligonucleotide disclosed herein. In some embodiments, a structural element is a 5′-end structure, 5′-end region, 5′-nucleotide, seed region, post-seed region, 3′-end region, 3′-terminal dinucleotide, 3′-end cap, or any portion of any of these structures, GC content, long GC stretch, and/or any modification, chemistry, stereochemistry, pattern of modification, chemistry or stereochemistry, or additional chemical moiety (e.g., including but not limited to, a targeting moiety, a lipid moiety, a GalNAc moiety, a carbohydrate moiety, etc.), any component, or any combination of any of the above.

### Biological Applications

[1416] As described herein, provided compositions and methods are capable of improving knockdown, including, single-stranded RNA interference of transcripts. In some embodiments, provided compositions and methods provide improved single-stranded RNA interference of transcripts compared to a reference pattern, which is a pattern from a reference condition selected from the group consisting of absence of the composition, presence of a reference composition, and combinations thereof. An improvement can be an improvement of any desired biological functions.

[1417] In some embodiments, the present disclosure provides a method for improving single-stranded RNA interference of a target transcript, comprising administering a composition comprising a first plurality of oligonucleotides, wherein the single-stranded RNA interference of the target transcript is improved relative to reference conditions selected from the group consisting of absence of the composition, presence of a reference composition, and combinations thereof.

[1418] In some embodiments, the present disclosure provides a method of mediating single-stranded RNA interference of a target, the method comprising steps of:

[1419] contacting a single-stranded RNA interference system containing the target transcript with an APOC3 oligonucleotide composition comprising a first plurality of oligonucleotides, in an amount, for a time, and under conditions sufficient for a set of single-stranded RNA interference products to be generated that is different from a set generated under reference conditions selected from the group consisting of absence of the composition, presence of a reference composition, and combinations thereof.

[1420] In some embodiments, the present disclosure provides compositions and methods for treating or preventing diseases, including but not limited to those described in references cited in this disclosure.

[1421] In some embodiments, the present disclosure provides a method for treating or preventing a disease, comprising administering to a subject an APOC3 oligonucleotide composition described herein.

[1422] In some embodiments, the present disclosure provides a method for treating or preventing a disease, comprising administering to a subject an APOC3 oligonucleotide composition comprising a first plurality of oligonucleotides, which:

[1423] 1) have a common base sequence complementary to a target sequence in a transcript; and

[1424] 2) comprise one or more modified sugar moieties and modified internucleotidic linkages,

[1425] the oligonucleotide composition being characterized in that, when it is contacted with the transcript in a single-stranded RNA interference system, RNAi-mediated knockdown of the transcript is improved relative to that observed under reference conditions selected from the group consisting of absence of the composition, presence of a reference composition, and combinations thereof.

[1426] In some embodiments, the present disclosure provides a method for treating or preventing a disease, comprising administering to a subject an APOC3 oligonucleotide composition comprising a first plurality of oligonucleotides capable of directing single-stranded RNA interference, wherein oligonucleotides are of a particular oligonucleotide type defined by:

[1427] 1) base sequence;

[1428] 2) pattern of backbone linkages;

[1429] 3) pattern of backbone chiral centers; and

[1430] 4) pattern of backbone phosphorus modifications,

which composition is chirally controlled in that it is enriched, relative to a substantially racemic preparation of oligonucleotides having the same base sequence, for oligonucleotides of the particular oligonucleotide type, wherein:

[1431] the oligonucleotide composition being characterized in that, when it is contacted with the transcript in a single-stranded RNA interference system, RNAi-mediated knockdown of the transcript is improved relative to that observed under reference conditions selected from the group consisting of absence of the composition, presence of a reference composition, and combinations thereof.

[1432] In some embodiments, a disease is one in which administering a provided composition capable of directing single-stranded RNA interference can repair, restore or introduce a new beneficial function.

[1433] In some embodiments, a disease is one in which, after administering a provided composition, a gene is effectively knocked down by improving single-stranded RNA interference system of the gene transcript.

[1434] In some embodiments, a disease is cancer.

[1435] In some embodiments, the present disclosure provides a method of treating a disease by administering a composition comprising a first plurality of oligonucleotides sharing a common base sequence comprising a common base sequence, which nucleotide sequence is complementary to a target sequence in the target transcript,

[1436] the improvement that comprises using as the oligonucleotide composition a stereocontrolled oligonucleotide composition characterized in that, when it is contacted with the transcript in an APOC3 oligonucleotide or a single-stranded RNA interference system, RNAi-mediated knockdown of the transcript is improved relative to that observed under reference conditions selected from the group consisting of absence of the composition, presence of a reference composition, and combinations thereof.

[1437] In some embodiments, a disease is cancer.

[1438] In some embodiments, a disease treatment comprises knockdown of a gene function by improving single-stranded RNA interference system.

[1439] In some embodiments, an APOC3 oligonucleotide or a single-stranded RNAi agent targets a target mRNA transcript.

[1440] In some embodiments, the common base sequence is capable of hybridizing with a transcript in a cell. In some embodiments, a common base sequence hybridizes with a transcript of any gene described herein or known in the art.

[1441] Treatment of Disorders

[1442] In some embodiments, provided oligonucleotides are capable of directing a decrease in the expression and/or level of a target gene or its gene product. In some embodiments, provided oligonucleotides are capable of directing a decrease in the expression and/or level of a target gene or its gene product via RNA interference. In some embodiments, provided oligonucleotides are capable of directing a decrease in the expression and/or level of a target gene or its gene product via a biochemical mechanism which does not involve RNA interference or RISC (including, but not limited to, RNaseH-mediated knockdown or steric hindrance of gene expression). In some embodiments, provided oligonucleotides are capable of directing a decrease in the expression and/or level of a target gene or its gene product via RNA interference and/or RNase H-mediated knockdown. In some embodiments, provided oligonucleotides are capable of directing a decrease in the expression and/or level of a target gene or its gene product by sterically blocking translation after annealing to a target gene mRNA, and/or by altering or interfering with mRNA splicing and/or exon inclusion or exclusion.

[1443] In some embodiments, provided oligonucleotides target APOC3.

[1444] In some embodiments, APOC3 is a gene, or a gene product thereof (including, but not limited to, a transcript or protein), also known as APOCIII, ApocIII, HALP2, apolipoprotein C3; OMIM: 107720; MGI: 88055; HomoloGene: 81615; or GeneCards: 345; or Human APOC3: Entrez 345; Ensembl: ENSG00000110245; UniProt: P02656; RefSeq (mRNA): NM_000040; RefSeq (protein): NP 000031.1; Location (UCSC): Chr 11:116.83-116.83 Mb; Mouse Entrez 11814; Ensembl: ENSMUSG00000032081; UniProt: P33622; RefSeq (mRNA): NM_023114 NM_001289755 NM_001289756 NM_001289833; RefSeq (protein): NP_001276685.1 NP_075603.1; Location (UCSC): Chr 9: 46.23-46.24 Mb. APOC3 reportedly inhibits lipoprotein lipase and hepatic lipase; it is reported to inhibit hepatic uptake of triglyceride-rich particles. An increase in APOC3 levels reportedly induces the development of hypertriglyceridemia. Scientific papers reportedly suggest an intracellular role for APOC3 in promoting the assembly and secretion of triglyceride-rich VLDL particles from hepatic cells under lipid-rich conditions. However, two naturally-occurring point mutations in human APOC3 coding sequence, namely Ala23Thr and Lys58Glu, reportedly abolish the intracellular assembly and secretion of triglyceride-rich VLDL particles from hepatic cells. Two novel susceptibility haplotypes (specifically, P2-52-X1 and P1-S2-X1) have been reportedly discovered in ApoAI-CIII-AIV gene cluster on chromosome 11q23; these reportedly confer approximately threefold higher risk of coronary heart disease in normal as well as non-insulin diabetes mellitus. APOC3 delays the catabolism of triglyceride rich particles. Elevations of APOC3 found in genetic variation studies may predispose patients to non-alcoholic fatty liver disease. APOC3 expression has reportedly been implicated in various disorders, including but not limited to: atherosclerosis or dyslipidemia, elevated triglyceride levels, elevated cholesterol levels, elevated free fatty acids, and diabetes. Vaith et al. 1978 Biochimica et Biophysica Acta. 541 (2): 234-40; Nicolardi et al. 2013 Journal of Proteome Research. 12 (5): 2260-8; Mendivil et al. 2010 Arteriosclerosis, Thrombosis, and Vascular Biology. 30 (2): 239-45; Sundaram et al. 2010 Journal of Lipid Research. 51 (1): 150-161; Sundaram et al. 2010 Journal of Lipid Research. 51 (6): 1524-1534; Qin et al. August 2011 The Journal of Biological Chemistry. 286 (31): 27769-27780; Singh et al. November 2008 International Journal of Cardiology. 130 (3): e93-5; Singh et al. June 2007 Diabetes & Vascular Disease Research. 4 (2): 124-29.

[1445] In some embodiments, an APOC3-related disorder is a disorder related to, caused and/or associated with abnormal or excessive activity, level and/or expression of, a deleterious mutation in, or abnormal tissue or inter- or intracellular distribution of an APOC3 gene or a gene product thereof. In some embodiments, non-limiting examples of an APOC3-related disorder include: heart disease, atherosclerosis, dyslipidemia, elevated triglyceride levels (hypertriglyceridemia), elevated cholesterol levels (hypercholesterolemia), cardiovascular disease, metabolic syndrome, obesity and diabetes, premature chronic heart disease (CHD), eruptive xanthoma, hepatosplenomegaly, pancreatitis, aneurysm, angina, arrhythmia, atherosclerosis, cerebrovascular disease (stroke), hypertension, and hyperlipidemia. In some embodiments, non-limiting examples of an APOC3-related disorder include: hyperlipidemia, Type I diabetes, Type II diabetes mellitus, idiopathic Type I diabetes (Type Ib), latent autoimmune diabetes in adults (LADA), early-onset Type 2 diabetes (EOD), youth-onset atypical diabetes (YOAD), maturity onset diabetes of the young (MODY), malnutrition-related diabetes, gestational diabetes, coronary heart disease, ischemic stroke, restenosis after angioplasty, peripheral vascular disease, intermittent claudication, myocardial infarction, dyslipidemia, post-prandial lipemia, conditions of impaired glucose tolerance (IGT), conditions of impaired fasting plasma glucose, metabolic acidosis, ketosis, arthritis, obesity, osteoporosis, hypertension, congestive heart failure, left ventricular hypertrophy, peripheral arterial disease, diabetic retinopathy, macular degeneration, cataract, diabetic nephropathy, glomerulosclerosis, chronic renal failure, diabetic neuropathy, metabolic syndrome, syndrome X, premenstrual syndrome, angina pectoris, thrombosis, atherosclerosis, transient ischemic attacks, stroke, vascular restenosis, hyperglycemia, hyperinsulinemia, hypertrygliceridemia, insulin resistance, impaired glucose metabolism, erectile dysfunction, skin and connective tissue disorders, foot ulcerations and ulcerative colitis, endothelial dysfunction and impaired vascular compliance, hyper apo B lipoproteinemia, Alzheimer's, schizophrenia, impaired cognition, inflammatory bowel disease, ulcerative colitis, Crohn's disease, and irritable bowel syndrome, non-alcoholic steatohepatitis (NASH), or non-alcoholic fatty liver disease (NAFLD). portal hypertension, hepatic protein synthetic capability, hyperbilirubinemia, or encephalopathy. fatty liver, nonalcoholic fatty liver disease, nonalcoholic steatohepatitis, nonalcoholic steatohepatitis with liver fibrosis, nonalcoholic steatohepotitis with cirrhosis, or nonalcoholic steatohepatitis with cirrhosis and hepatocellular carcinoma.

[1446] In some embodiments, non-limiting examples of an APOC3-related disorder include: hyperlipidemia, Type I diabetes, Type II diabetes mellitus, idiopathic Type I diabetes (Type Ib), latent autoimmune diabetes in adults (LADA), early-onset Type 2 diabetes (EOD), youth-onset atypical diabetes (YOAD), maturity onset diabetes of the young (MODY), malnutrition-related diabetes, gestational diabetes, coronary heart disease, ischemic stroke, restenosis after angioplasty, peripheral vascular disease, intermittent claudication, myocardial infarction, dyslipidemia, post-prandial lipemia, conditions of impaired glucose tolerance (IGT), conditions of impaired fasting plasma glucose, metabolic acidosis, ketosis, arthritis, obesity, osteoporosis, hypertension, congestive heart failure, left ventricular hypertrophy, peripheral arterial disease, diabetic retinopathy, macular degeneration, cataract, diabetic nephropathy, glomerulosclerosis, chronic renal failure, diabetic neuropathy, metabolic syndrome, syndrome X, premenstrual syndrome, angina pectoris, thrombosis, atherosclerosis, transient ischemic attacks, stroke, vascular restenosis, hyperglycemia, hyperinsulinemia, hypertrygliceridemia, insulin resistance, impaired glucose metabolism, erectile dysfunction, skin and connective tissue disorders, foot ulcerations and ulcerative colitis, endothelial dysfunction and impaired vascular compliance, hyper apo B lipoproteinemia, Alzheimer's, schizophrenia, impaired cognition, inflammatory bowel disease, ulcerative colitis, Crohn's disease, and irritable bowel syndrome, non-alcoholic steatohepatitis (NASH), or non-alcoholic fatty liver disease (NAFLD).

[1447] In some embodiments, non-limiting examples of an APOC3-related disorder include: fatty liver, nonalcoholic fatty liver disease, nonalcoholic steatohepatitis, nonalcoholic steatohepatitis with liver fibrosis, nonalcoholic steatohepotitis with cirrhosis, or nonalcoholic steatohepatitis with cirrhosis and hepatocellular carcinoma.

[1448] Treatment of an APOC3-Related Disorder

[1449] In some embodiments, the present disclosure pertains to an APOC3 oligonucleotide or a single-stranded RNAi agent to APOC3. Various single-stranded RNAi agents to APOC3 are disclosed herein.

[1450] APOC3 expression has reportedly been implicated in various disorders, including but not limited to: atherosclerosis or dyslipidemia, elevated triglyceride levels, elevated cholesterol levels, elevated free fatty acids, and diabetes. In some embodiments, the present disclosure pertains to a method of treating or ameliorating an APOC3-related disorder in a patient thereof, the method comprising the step of administering to the patient a therapeutically effective amount of an APOC3 oligonucleotide or a single-stranded RNAi agent to APOC3.

[1451] In some embodiments, the present disclosure pertains to a method for introducing an APOC3 oligonucleotide or a single-stranded RNAi agent that decreases APOC3 gene expression into a cell, the method comprising: contacting the cell with an APOC3 oligonucleotide or a single-stranded RNAi agent.

[1452] In some embodiments, the present disclosure pertains to a method for decreasing APOC3 gene expression in a mammal in need thereof, the method comprising: administering to the mammal a nucleic acid-lipid particle comprising an APOC3 oligonucleotide or a single-stranded RNAi agent to APOC3.

[1453] In some embodiments, the present disclosure pertains to a method for the in vivo delivery of an APOC3 oligonucleotide or a single-stranded RNAi agent that targets APOC3 gene expression, the method comprising: administering to a mammal an APOC3 oligonucleotide or a single-stranded RNAi agent to APOC3.

[1454] In some embodiments, the present disclosure pertains to a method for treating and/or ameliorating one or more symptoms associated with atherosclerosis or dyslipidemia in a mammal in need thereof, the method comprising: administering to the mammal a therapeutically effective amount of an APOC3 oligonucleotide or a single-stranded RNAi agent to APOC3.

[1455] In some embodiments, the present disclosure pertains to a method for reducing susceptibility to atherosclerosis or dyslipidemia in a mammal in need thereof, the method comprising: administering to the mammal a therapeutically effective amount of an APOC3 oligonucleotide or a single-stranded RNAi agent to APOC3.

[1456] In some embodiments, the present disclosure pertains to a method for preventing or delaying the onset of atherosclerosis or dyslipidemia in a mammal in need thereof, the method comprising: administering to the mammal a therapeutically effective amount of an APOC3 oligonucleotide or a single-stranded RNAi agent to APOC3.

[1457] In some embodiments, the present disclosure pertains to a method for lowering triglyceride levels in a mammal in need thereof, the method comprising: administering to the mammal a therapeutically effective amount of an APOC3 oligonucleotide or a single-stranded RNAi agent to APOC3.

[1458] In some embodiments, the method of the present disclosure is for the treatment of hyperlipidemia, Type I diabetes, Type II diabetes mellitus, idiopathic Type I diabetes (Type Ib), latent autoimmune diabetes in adults (LADA), early-onset Type 2 diabetes (EOD), youth-onset atypical diabetes (YOAD), maturity onset diabetes of the young (MODY), malnutrition-related diabetes, gestational diabetes, coronary heart disease, ischemic stroke, restenosis after angioplasty, peripheral vascular disease, intermittent claudication, myocardial infarction, dyslipidemia, post-prandial lipemia, conditions of impaired glucose tolerance (IGT), conditions of impaired fasting plasma glucose, metabolic acidosis, ketosis, arthritis, obesity, osteoporosis, hypertension, congestive heart failure, left ventricular hypertrophy, peripheral arterial disease, diabetic retinopathy, macular degeneration, cataract, diabetic nephropathy, glomerulosclerosis, chronic renal failure, diabetic neuropathy, metabolic syndrome, syndrome X, premenstrual syndrome, angina pectoris, thrombosis, atherosclerosis, transient ischemic attacks, stroke, vascular restenosis, hyperglycemia, hyperinsulinemia, hypertrygliceridemia, elevated low density lipoprotein (LDL) cholesterol levels (hypercholesterolemia), insulin resistance, impaired glucose metabolism, erectile dysfunction, skin and connective tissue disorders, foot ulcerations and ulcerative colitis, endothelial dysfunction and impaired vascular compliance, hyper apo B lipoproteinemia, Alzheimer's, schizophrenia, impaired cognition, inflammatory bowel disease, ulcerative colitis, Crohn's disease, and irritable bowel syndrome, non-alcoholic steatohepatitis (NASH), or non-alcoholic fatty liver disease (NAFLD), in humans wherein the method comprises administering to a subject a therapeutically effective amount of an APOC3 oligonucleotide of the present disclosure.

[1459] In some embodiments, the method reduces portal hypertension, hepatic protein synthetic capability, hyperbilirubinemia, or encephalopathy wherein the method comprise administering to a subject a therapeutically effective amount of an APOC3 oligonucleotide of the present disclosure.

[1460] The present disclosure is also directed at a method for the treatment of reduction of at least one point in severity of nonalcoholic fatty liver disease or non-alcoholic steatohepatitis grading scoring systems, reduction of the level of serum markers of non-alcoholic steatohepatitis activity, reduction of non-alcoholic steatohepatitis disease activity or reduction in the medical consequences of non-alcoholic steatohepatitis in humans administering to a subject a therapeutically effective amount of an APOC3 oligonucleotide of the present disclosure. In some embodiments, the present disclosure pertains to a method for treating and/or ameliorating one or more symptoms associated with atherosclerosis or dyslipidemia in a mammal in need thereof, the method comprising: administering to the mammal a therapeutically effective amount of a nucleic acid-lipid particle comprising an APOC3 oligonucleotide or a single-stranded RNAi agent to APOC3.

[1461] In some embodiments, the present disclosure pertains to a method for reducing susceptibility to atherosclerosis or dyslipidemia in a mammal in need thereof, the method comprising: administering to the mammal a therapeutically effective amount of a nucleic acid-lipid particle comprising an APOC3 oligonucleotide or a single-stranded RNAi agent to APOC3.

[1462] In some embodiments, the present disclosure pertains to a method for preventing or delaying the onset of atherosclerosis or dyslipidemia in a mammal in need thereof, the method comprising: administering to the mammal a therapeutically effective amount of a nucleic acid-lipid particle comprising an APOC3 oligonucleotide or a single-stranded RNAi agent to APOC3.

[1463] In some embodiments, the present disclosure pertains to a method for lowering triglyceride levels in a mammal in need thereof, the method comprising: administering to the mammal a therapeutically effective amount of a nucleic acid-lipid particle comprising an APOC3 oligonucleotide or a single-stranded RNAi agent to APOC3.

[1464] In some embodiments, the present disclosure pertains to a method for lowering cholesterol levels in a mammal in need thereof, the method comprising: administering to the mammal a therapeutically effective amount of an APOC3 oligonucleotide or a single-stranded RNAi agent to APOC3.

[1465] In some embodiments, the present disclosure pertains to a method for lowering cholesterol levels in a mammal in need thereof, the method comprising: administering to the mammal a therapeutically effective amount of a nucleic acid-lipid particle comprising an APOC3 oligonucleotide or a single-stranded RNAi agent to APOC3.

[1466] In some embodiments, the present disclosure pertains to a method of inhibiting APOC3 expression in a cell, the method comprising: (a) contacting the cell with an APOC3 oligonucleotide or a single-stranded RNAi agent to APOC3; and (b) maintaining the cell produced in step (a) for a time sufficient to obtain degradation of the mRNA transcript of an APOC3 gene, thereby inhibiting expression of the APOC3 gene in the cell.

[1467] In some embodiments, APOC3 expression is inhibited by at least 30%.

[1468] In some embodiments, the present disclosure pertains to a method of treating a disorder mediated by APOC3 expression comprising administering to a human in need of such treatment a therapeutically effective amount of an APOC3 oligonucleotide or a single-stranded RNAi agent to APOC3.

[1469] In some embodiments, the disorder is elevated triglyceride levels.

[1470] In some embodiments, the disorder is triglyceride levels >150 mg/dL or >500 mg/dL.

[1471] In some embodiments, administration causes an increase in lipoprotein lipase and/or hepatic lipase activity.

[1472] In some embodiments, the present disclosure pertains to a method of improving peripheral insulin sensitivity comprising administering to a subject with diabetes an APOC3 oligonucleotide or a single-stranded RNAi agent to APOC3 thereby improving peripheral insulin sensitivity.

[1473] In some embodiments, the present disclosure pertains to a method of improving peripheral insulin sensitivity comprising administering to a subject with moderately controlled type II diabetes and administering an APOC3 oligonucleotide or a single-stranded RNAi agent to APOC3 thereby improving peripheral insulin sensitivity.

[1474] In some embodiments, the present disclosure pertains to a method of lowering free fatty acids comprising administering to a subject with diabetes and administering an APOC3 oligonucleotide or a single-stranded RNAi agent APOC3, thereby lowering free fatty acids.

[1475] In some embodiments, the present disclosure pertains to a method of lowering free fatty acids comprising administering to a subject with moderately controlled type II diabetes and administering an APOC3 oligonucleotide or a single-stranded RNAi agent to APOC3, thereby lowering free fatty acids.

[1476] In some embodiments, the present disclosure pertains to a method of reducing intramyocellular triglyceride deposition comprising administering to a subject with diabetes and administering an APOC3 oligonucleotide or a single-stranded RNAi agent to APOC3, thereby reducing intramyocellular triglyceride deposition.

[1477] In some embodiments, the present disclosure pertains to a method of reducing intramyocellular triglyceride deposition comprising administering to a subject with moderately controlled type II diabetes and administering an APOC3 oligonucleotide or a single-stranded RNAi agent to APOC3, thereby reducing intramyocellular triglyceride deposition.

[1478] In some embodiments, the present disclosure pertains to a method of improving a diabetes profile of a subject comprising administering to the subject an APOC3 oligonucleotide or a single-stranded RNAi agent to APOC3, wherein insulin sensitivity index, glucose disposal rate, glucose MCR, glucose metabolism:insulin ration is improved; wherein free fatty acids, triglycerides, non-HDL-C, VLDL-C, APOC3 containing VLDL, APOB and LDL-C are reduced and HDL-C is increased, thereby improving the diabetes profile of the subject.

[1479] In some embodiments, the subject is on a stable dose of metformin.

[1480] In some embodiments, the present disclosure pertains to a compound comprising an APOC3 oligonucleotide or a single-stranded RNAi agent to APOC3 for use in a subject to: improve peripheral insulin sensitivity; lower free fatty acids; reduce intramyocellular triglyceride deposition; improve a lipid profile; and/or improve a diabetic profile.

[1481] In some embodiments, a subject is administered a second agent (e.g., an additional therapeutic agent).

[1482] In some embodiments, the second agent is selected from an APOC3 lowering agent, cholesterol lowering agent, non-HDL lipid lowering agent, LDL lowering agent, TG lowering agent, cholesterol lowering agent, HDL raising agent, fish oil, niacin, fibrate, statin, DCCR (salt of diazoxide), glucose-lowering agent or anti-diabetic agents.

[1483] The oligonucleotides of the present disclosure can be administered alone or in combination with one or more additional therapeutic agents. By “administered in combination” or “combination therapy” it is meant that the oligonucleotide of the present disclosure and one or more additional therapeutic agents are administered concurrently to the mammal being treated. When administered in combination each component may be administered at the same time or sequentially in any order at different points in time. Thus, each component may be administered separately but sufficiently closely in time so as to provide the desired therapeutic effect. Thus, the compositions and methods of prevention and treatment described herein include use of combination agents.

[1484] The combination agents are administered to a mammal in a therapeutically effective amount. By “therapeutically effective amount” it is meant an amount of an APOC3 oligonucleotide of the present disclosure that, when administered alone or in combination with an additional therapeutic agent to a mammal, is effective to treat the desired disease/condition (e.g., obesity, diabetes, and cardiovascular conditions).

[1485] In some embodiments, an oligonucleotides of the present disclosure may be administered in combination with an additional pharmaceutical agent selected from: an anti-inflammatory agent, an anti-diabetic agent, and a cholesterol/lipid modulating agent.

[1486] In some embodiments, an oligonucleotides of the present disclosure may be administered in combination with an additional pharmaceutical agent selected from: an acetyl-CoA carboxylase-(ACC) inhibitor, a diacylglycerol O-acyltransferase 1 (DGAT-1) inhibitor, a diacylglycerol O-acyltransferase 2 (DGAT-2) inhibitor, monoacylglycerol O-acyltransferase inhibitors, a phosphodiesterase (PDE)-10 inhibitor, an AMPK activator, a sulfonylurea, a meglitinide, an α-amylase inhibitor, an α-glucoside hydrolase inhibitor, an α-glucosidase inhibitor, a PPARγ agonist, a PPAR α/γ agonist, a biguanide, a glucagon-like peptide 1 (GLP-1) modulator, liraglutide, albiglutide, exenatide, albiglutide, lixisenatide, dulaglutide, semaglutide, a protein tyrosine phosphatase-1B (PTP-1B) inhibitor, SIRT-1 activator, a dipeptidyl peptidase IV (DPP-IV) inhibitor, an insulin secreatagogue, a fatty acid oxidation inhibitor, an A2 antagonist, a c-jun amino-terminal kinase (JNK) inhibitor, glucokinase activators (GKa), insulin, an insulin mimetic, a glycogen phosphorylase inhibitor, a VPAC2 receptor agonist, SGLT2 inhibitors, a glucagon receptor modulator, GPR119 modulators, FGF21 derivatives or analogs, TGRS receptor modulators, GPBAR1 receptor modulators, GPR40 agonists, GPR120 modulators, high affinity nicotinic acid receptor (HM74A) activators, SGLT1 inhibitors, inhibitors or modulators of carnitine palmitoyl transferase enzymes, inhibitors of fructose 1,6-diphosphatase, inhibitors of aldose reductase, mineralocorticoid receptor inhibitors, inhibitors of TORC2, inhibitors of CCR2 and/or CCR5, inhibitors of PKC isoforms (e.g. PKCα, PKCβ, PKCγ), inhibitors of fatty acid synthetase, inhibitors of serine palmitoyl transferase, modulators of GPR81, GPR39, GPR43, GPR41, GPR105, Kv1.3, retinol binding protein 4, glucocorticoid receptor, somatostain receptors, inhibitors or modulators of PDHK2 or PDHK4, inhibitors of MAP4K4, modulators of IL1 family including IL1beta, HMG-CoA reductase inhibitors, squalene synthetase inhibitors, fibrates, bile acid sequestrants, ACAT inhibitors, MTP inhibitors, lipooxygenase inhibitors, cholesterol absorption inhibitors, PCSK9 modulators, cholesteryl ester transfer protein inhibitors and modulators of RXRalpha.

[1487] In some embodiments, an oligonucleotides of the present disclosure may be administered in combination with an additional pharmaceutical agent selected from: cysteamine or a pharmaceutically acceptable salt thereof, cystamine or a pharmaceutically acceptable salt thereof, an anti-oxidant compound, lecithin, vitamin B complex, a bile salt preparations, an antagonists of Cannabinoid-1 (CB1) receptor, an inverse agonists of Cannabinoid-1 (CB1) receptor, a peroxisome proliferator-activated receptor) activity regulators, a benzothiazepine or benzothiepine compound, an RNA antisense construct to inhibit protein tyrosine phosphatase PTPRU, a heteroatom-linked substituted piperidine and derivatives thereof, an azacyclopentane derivative capable of inhibiting stearoyl-coenzyme alpha delta-9 desaturase, acylamide compound having secretagogue or inducer activity of adiponectin, a quaternary ammonium compound, Glatiramer acetate, pentraxin proteins, a HMG-CoA reductase inhibitor, n-acetyl cysteine, isoflavone compound, a macrolide antibiotic, a galectin inhibitor, an antibody, or any combination of thereof.

[1488] In some embodiments, an oligonucleotide of the present disclosure may be administered in combination with a treatment of non-alcoholic steatohepatitis (NASH) and/or non-alcoholic fatty liver disease (NAFLD) (i.e., anti-NASH and anti-NAFLD agents), such as Orlistat, TZDs and other insulin sensitizing agents, FGF21 analogs, Metformin, Omega-3-acid ethyl esters (e.g. Lovaza), Fibrates, HMG CoA-reductase Inhibitors, Ezitimbe, Probucol, Ursodeoxycholic acid, TGRS agonists, FXR agonists, Vitamin E, Betaine, Pentoxifylline, CB1 antagonists, Carnitine, N-acetylcysteine, Reduced glutathione, lorcaserin, the combination of naltrexone with buproprion, SGLT2 Inhibitors, Phentermine, Topiramate, Incretin (GLP and GIP) analogs and Angiotensin-receptor blockers. Preferred agents for the treatment of non-alcoholic steatohepatitis (NASH) and/or non-alcoholic fatty liver disease (NAFLD) (i.e., anti-NASH and anti-NAFLD agents) are an acetyl-CoA carboxylase (ACC) inhibitor, a ketohexokinase (KHK) inhibitor, a GLP-1 receptor agonist, an FXR agonist, a CB1 antagonist, an ASK1 inhibitor, an inhibitor of CCR2 and/or CCR5, a PNPLA3 inhibitor, a DGAT1 inhibitor, a DGAT2 inhibitor, an FGF21 analog, an FGF19 analog, an SGLT2 inhibitor, a PPAR agonist, an AMPK activator, an SCD1 inhibitor or an MPO inhibitor. A commonly assigned patent application PCT/IB2017/057577 filed Dec. 1, 2017.is directed to GLP-1 receptor agonists. Most preferred are a FXR agonist, an apoptosis signal-regulating kinase 1 (ASK1) inhibitor, a PPAR agonist, a GLP-1 receptor agonist, a SGLT inhibitor, a an ACC inhibitor and a KHK inhibitor.

[1489] In some embodiments, an oligonucleotide of the present disclosure may be administered in combination with an anti-diabetic agent including any of: insulin, metfomin, DPPIV inhibitors (e.g., sitagliptin), GLP-1 receptor agonists, analogues and mimetics, SGLT1 and SGLT2 inhibitors (e.g., ertuglifozin)). Preferred agents are metaformin, sitagliptin and ertuglifozin. Suitable anti-diabetic agents include an acetyl-CoA carboxylase- (ACC) inhibitor such as those described in WO2009144554, WO2003072197, WO2009144555 and WO2008065508, a diacylglycerol O-acyltransferase 1 (DGAT-1) inhibitor, such as those described in WO09016462 or WO2010086820, AZD7687 or LCQ908, a diacylglycerol O-acyltransferase 2 (DGAT-2) inhibitor, such as those described in WO2015/140658, monoacylglycerol O-acyltransferase inhibitors, a phosphodiesterase (PDE)-10 inhibitor, an AMPK activator, a sulfonylurea (e.g., acetohexamide, chlorpropamide, diabinese, glibenclamide, glipizide, glyburide, glimepiride, gliclazide, glipentide, gliquidone, glisolamide, tolazamide, and tolbutamide), a meglitinide, an α-amylase inhibitor (e.g., tendamistat, trestatin and AL-3688), an α-glucoside hydrolase inhibitor (e.g., acarbose), an α-glucosidase inhibitor (e.g., adiposine, camiglibose, emiglitate, miglitol, voglibose, pradimicin-Q, and salbostatin), a PPARγ agonist (e.g., balaglitazone, ciglitazone, darglitazone, englitazone, isaglitazone, pioglitazone and rosiglitazone), a PPAR α/γ agonist (e.g., CLX-0940, GW-1536, GW-1929, GW-2433, KRP-297, L-796449, LR-90, MK-0767 and SB-219994), a biguanide (e.g., metformin), a glucagon-like peptide 1 (GLP-1) receptor agonist (e.g., exendin-3 and exendin-4), liraglutide, albiglutide, exenatide (Byetta®), albiglutide, lixisenatide, dulaglutide, semaglutide, NN-9924, TTP-054. TTP-273, a protein tyrosine phosphatase-1B (PTP-1B) inhibitor (e.g., trodusquemine, hyrtiosal extract, and compounds disclosed by Zhang, S., et al., Drug Discovery Today, 12(9/10), 373-381 (2007)), SIRT-1 activator (e.g., resveratrol, GSK2245840 or GSK184072), a dipeptidyl peptidease IV (DPP-IV) inhibitor (e.g., those in WO2005116014, sitagliptin, vildagliptin, alogliptin, dutogliptin, linagliptin and saxagliptin), an insulin secreatagogue, a fatty acid oxidation inhibitor, an A2 antagonist, a c-jun amino-terminal kinase (JNK) inhibitor, glucokinase activators (GKa) such as those described in WO2010103437, WO2010103438, WO2010013161, WO2007122482, TTP-399, TTP-355, TTP-547, AZD1656, ARRY403, MK-0599, TAK-329, AZD5658 or GKM-001, insulin, an insulin mimetic, a glycogen phosphorylase inhibitor (e.g. GSK1362885), a VPAC2 receptor agonist, SGLT2 inhibitors, such as those described in E. C. Chao et al. Nature Reviews Drug Discovery 9, 551-559 (July 2010) including dapagliflozin, canagliflozin, empagliflozin, tofogliflozin (CSG452), Ertugliflozin, ASP-1941, THR1474, TS-071, ISIS388626 and LX4211 as well as those in WO2010023594, a glucagon receptor modulator such as those described in Demong, D. E. et al. Annual Reports in Medicinal Chemistry 2008, 43, 119-137, GPR119 modulators, particularly agonists, such as those described in WO2010140092, WO2010128425, WO2010128414, WO2010106457, Jones, R. M. et al. in Medicinal Chemistry 2009, 44, 149-170 (e.g. MBX-2982, GSK1292263, APD597 and PSN821), FGF21 derivatives or analogs such as those described in Kharitonenkov, A. et al. et al., Current Opinion in Investigational Drugs 2009, 10(4)359-364, TGRS (also termed GPBAR1) receptor modulators, particularly agonists, such as those described in Zhong, M., Current Topics in Medicinal Chemistry, 2010, 10(4), 386-396 and INT777, GPR40 agonists, such as those described in Medina, J. C., Annual Reports in Medicinal Chemistry, 2008, 43, 75-85, including but not limited to TAK-875, GPR120 modulators, particularly agonists, high affinity nicotinic acid receptor (HM74A) activators, and SGLT1 inhibitors, such as GSK1614235. A further representative listing of anti-diabetic agents that can be combined with the oligonucleotides of the present disclosure can be found, for example, at page 28, line 35 through page 30, line 19 of WO2011005611. Preferred anti-diabetic agents are metformin and DPP-IV inhibitors (e.g., sitagliptin, vildagliptin, alogliptin, dutogliptin, linagliptin and saxagliptin). Other antidiabetic agents could include inhibitors or modulators of carnitine palmitoyl transferase enzymes, inhibitors of fructose 1,6-diphosphatase, inhibitors of aldose reductase, mineralocorticoid receptor inhibitors, inhibitors of TORC2, inhibitors of CCR2 and/or CCR5, inhibitors of PKC isoforms (e.g. PKCα, PKCβ, PKCγ), inhibitors of fatty acid synthetase, inhibitors of serine palmitoyl transferase, modulators of GPR81, GPR39, GPR43, GPR41, GPR105, Kv1.3, retinol binding protein 4, glucocorticoid receptor, somatostain receptors (e.g. SSTR1, SSTR2, SSTR3 and SSTR5), inhibitors or modulators of PDHK2 or PDHK4, inhibitors of MAP4K4, modulators of IL1 family including IL1beta, modulators of RXRalpha. In addition suitable anti-diabetic agents include mechanisms listed by Carpino, P. A., Goodwin, B. Expert Opin. Ther. Pat, 2010, 20(12), 1627-51.

[1490] Suitable anti-obesity agents include 11P-hydroxy steroid dehydrogenase-1 (11β-HSD type 1) inhibitors, stearoyl-CoA desaturase-1 (SCD-1) inhibitor, MCR-4 agonists, cholecystokinin-A (CCK-A) agonists, monoamine reuptake inhibitors (such as sibutramine), sympathomimetic agents, β3 adrenergic agonists, dopamine agonists (such as bromocriptine), melanocyte-stimulating hormone analogs, 5HT2c agonists, melanin concentrating hormone antagonists, leptin (the OB protein), leptin analogs, leptin agonists, galanin antagonists, lipase inhibitors (such as tetrahydrolipstatin, i.e. orlistat), anorectic agents (such as a bombesin agonist), neuropeptide-Y antagonists (e.g., NPY Y5 antagonists), PYY3-36 (including analogs thereof), thyromimetic agents, dehydroepiandrosterone or an analog thereof, glucocorticoid agonists or antagonists, orexin antagonists, glucagon-like peptide-1 agonists, ciliary neurotrophic factors (such as Axokine™ available from Regeneron Pharmaceuticals, Inc., Tarrytown, N.Y., and Procter & Gamble Company, Cincinnati, Ohio), human agouti-related protein (AGRP) inhibitors, ghrelin antagonists, histamine 3 antagonists or inverse agonists, neuromedin U agonists, MTP/ApoB inhibitors (e.g., gut-selective MTP inhibitors, such as dirlotapide), opioid antagonist, orexin antagonist, the combination of naltrexone with buproprion and the like.

[1491] Preferred anti-obesity agents for use in the combination aspects of the present disclosure include gut-selective MTP inhibitors (e.g., dirlotapide, mitratapide and implitapide, R56918 (CAS No. 403987) and CAS No. 913541-47-6), CCKa agonists (e.g., N-benzyl-2-[4-(1H-indol-3-ylmethyl)-5-oxo-1-phenyl-4,5-dihydro-2,3,6,10b-tetraaza-benzo[e]azulen-6-yl]-N-isopropyl-acetamide described in PCT Publication No. WO 2005/116034 or US Publication No. 2005-0267100 A1), 5HT2c agonists (e.g., lorcaserin), MCR4 agonist (e.g., compounds described in U.S. Pat. No. 6,818,658), lipase inhibitor (e.g., Cetilistat), PYY3-36 (as used herein “PYY3-36” includes analogs, such as peglated PYY3-36 e.g., those described in US Publication 2006/0178501), opioid antagonists (e.g., naltrexone), the combination of naltrexone with buproprion, oleoyl-estrone (CAS No. 180003-17-2), obinepitide (TM30338), pramlintide (Symlin®), tesofensine (NS2330), leptin, liraglutide, bromocriptine, orlistat, exenatide (Byetta®), AOD-9604 (CAS No. 221231-10-3), phentermine and topiramate (trade name: Qsymia), and sibutramine. Preferably, oligonucleotides of the present disclosure and combination therapies are administered in conjunction with exercise and a sensible diet.

[1492] Those skilled in the art will recognize that oligonucleotides of the present disclosure may also be used in conjunction with cardiovascular or cerebrovascular treatments as described in the paragraphs below. Oligonucleotides of the present disclosure may also be used with cardiovascular therapies including PCI, stenting, drug eluting stents, stem cell therapy and medical devices such as implanted pacemakers, defibrillators, or cardiac resynchronization therapy.

[1493] An oligonucleotide of the present disclosure may be used in combination with any of: cholesterol modulating agents (including cholesterol lowering agents) such as a lipase inhibitor, an HMG-CoA reductase inhibitor, an HMG-CoA synthase inhibitor, an HMG-CoA reductase gene expression inhibitor, an HMG-CoA synthase gene expression inhibitor, an MTP/Apo B secretion inhibitor, a CETP inhibitor, a bile acid absorption inhibitor, a cholesterol absorption inhibitor, a cholesterol synthesis inhibitor, a squalene synthetase inhibitor, a squalene epoxidase inhibitor, a squalene cyclase inhibitor, a combined squalene epoxidase/squalene cyclase inhibitor, a fibrate, niacin, an ion-exchange resin, an antioxidant, an ACAT inhibitor or a bile acid sequestrant or an agent such as mipomersen.

[1494] Examples of suitable cholesterol/lipid lowering agents and lipid profile therapies include: HMG-CoA reductase inhibitors (e.g., pravastatin, lovastatin, atorvastatin, simvastatin, fluvastatin, NK-104 (a.k.a. itavastatin, or nisvastatin or nisbastatin) and ZD-4522 (a.k.a. rosuvastatin, or atavastatin or visastatin); squalene synthetase inhibitors; fibrates; bile acid sequestrants (such as questran); ACAT inhibitors; MTP inhibitors; lipooxygenase inhibitors; cholesterol absorption inhibitors; and cholesteryl ester transfer protein inhibitors. Other atherosclerotic agents include PCSK9 modulators.

[1495] Administration of an APOC3 Oligonucleotide or a Single-Stranded RNAi Agent

[1496] In some embodiments, provided oligonucleotides are capable of directing a decrease in the expression and/or level of a target gene or its gene product. In some embodiments, provided oligonucleotides are capable of directing a decrease in the expression and/or level of a target gene or its gene product via RNA interference. In some embodiments, provided oligonucleotides are capable of directing a decrease in the expression and/or level of a target gene or its gene product via a biochemical mechanism which does not involve RNA interference or RISC (including, but not limited to, RNaseH-mediated knockdown or steric hindrance of gene expression). In some embodiments, provided oligonucleotides are capable of directing a decrease in the expression and/or level of a target gene or its gene product via RNA interference and/or RNase H-mediated knockdown. In some embodiments, provided oligonucleotides are capable of directing a decrease in the expression and/or level of a target gene or its gene product by sterically blocking translation after annealing to a target gene mRNA, and/or by altering or interfering with mRNA splicing and/or exon inclusion or exclusion. In some embodiments, provided oligonucleotides are administered with any vehicle, in any dosing regiment, and in any manner described herein or known in the art.

[1497] In some embodiments, a provided oligonucleotide composition is administered at a dose and/or frequency lower than that of an otherwise comparable reference oligonucleotide composition with comparable effect in improving the knockdown of a target transcript. In some embodiments, a stereocontrolled oligonucleotide composition is administered at a dose and/or frequency lower than that of an otherwise comparable stereorandom reference oligonucleotide composition with comparable effect in improving the knockdown of the target transcript.

[1498] In some embodiments, the present disclosure recognizes that properties, e.g., improved single-stranded RNA interference activity, etc. of oligonucleotides and compositions thereof can be optimized by chemical modifications and/or stereochemistry. In some embodiments, the present disclosure provides methods for optimizing oligonucleotide properties through chemical modifications and stereochemistry.

[1499] By controlling of chemical modifications and/or stereochemistry, the present disclosure provides improved oligonucleotide compositions and methods. In some embodiments, provided oligonucleotides capable of directing single-stranded RNA interference comprise chemical modifications. In some embodiments, provided oligonucleotides capable of directing single-stranded RNA interference comprise base modifications, sugar modifications, internucleotidic linkage modifications, or any combinations thereof. In some embodiments, provided oligonucleotides capable of directing single-stranded RNA interference comprise base modifications. In some embodiments, provided oligonucleotides capable of directing single-stranded RNA interference comprise sugar modifications. In some embodiments, provided oligonucleotides comprises 2′-modifications on the sugar moieties. In some embodiments, provided oligonucleotides comprises one or more modified internucleotidic linkages and one or more natural phosphate linkages. A natural phosphate linkage can be incorporated into various locations of an APOC3 oligonucleotide. In some embodiments, a natural phosphate linkage is incorporated into the 5′-end region. In some embodiments, a natural phosphate linkage is incorporated into the middle of an APOC3 oligonucleotide. In some embodiments, the present disclosure provides a method comprising administering a composition comprising a first plurality of oligonucleotides, which composition displays improved delivery as compared with a reference composition comprising a plurality of oligonucleotides, each of which also has the common base sequence but which differs structurally from the oligonucleotides of the first plurality in that:

[1500] individual oligonucleotides within the reference plurality differ from one another in stereochemical structure; and/or

[1501] at least some oligonucleotides within the reference plurality have a structure different from a structure represented by the plurality of oligonucleotides of the composition.

[1502] In some embodiments, the present disclosure provides a method of administering an APOC3 oligonucleotide composition comprising a first plurality of oligonucleotides capable of directing single-stranded RNA interference and having a common nucleotide sequence, the improvement that comprises:

[1503] administering an APOC3 oligonucleotide comprising a first plurality of oligonucleotides that is characterized by improved delivery relative to a reference oligonucleotide composition of the same common nucleotide sequence.

[1504] In some embodiments, provided oligonucleotides, compositions and methods provide improved systemic delivery. In some embodiments, provided oligonucleotides, compositions and methods provide improved cytoplasmatic delivery. In some embodiments, improved delivery is to a population of cells. In some embodiments, improved delivery is to a tissue. In some embodiments, improved delivery is to an organ. In some embodiments, improved delivery is to an organism. Example structural elements (e.g., chemical modifications, stereochemistry, combinations thereof, etc.), oligonucleotides, compositions and methods that provide improved delivery are extensively described in this disclosure.

[1505] In some embodiments, the present disclosure provides a method of identifying and/or characterizing an APOC3 oligonucleotide composition, the method comprising steps of:

[1506] providing at least one composition comprising a first plurality of oligonucleotides; and

[1507] assessing delivery relative to a reference composition.

[1508] In some embodiments, the present disclosure provides a method of identifying and/or characterizing an APOC3 oligonucleotide composition, the method comprising steps of:

[1509] providing at least one composition comprising a first plurality of oligonucleotides; and

[1510] assessing cellular uptake relative to a reference composition.

[1511] In some embodiments, properties of a provided oligonucleotide compositions are compared to a reference oligonucleotide composition. In some embodiments, a reference oligonucleotide composition comprises a reference plurality of oligonucleotides.

[1512] In some embodiments, a reference oligonucleotide composition is a stereorandom oligonucleotide composition. In some embodiments, a reference oligonucleotide composition is a stereorandom composition of oligonucleotides of which all internucleotidic linkages are phosphorothioate. In some embodiments, a reference oligonucleotide composition is a DNA oligonucleotide composition with all phosphate linkages.

[1513] In some embodiments, a reference composition is a composition of oligonucleotides having the same base sequence and the same chemical modifications. In some embodiments, a reference composition is a composition of oligonucleotides having the same base sequence and the same pattern of chemical modifications. In some embodiments, a reference composition is a chirally un-controlled (or stereorandom) composition of oligonucleotides having the same base sequence and chemical modifications.

[1514] In some embodiments, a reference composition is a composition of oligonucleotides having the same base sequence but different chemical modifications. In some embodiments, a reference composition is a composition of oligonucleotides having the same base sequence, base modifications, internucleotidic linkage modifications but different sugar modifications. In some embodiments, a reference composition has fewer 2′-modified sugar modifications. In some embodiments, a reference composition is a composition of oligonucleotides having the same base sequence, base modifications, sugar modifications but different internucleotidic linkage modifications. In some embodiments, a reference composition has more internucleotidic linkage modifications. In some embodiments, a reference composition has fewer natural phosphate linkages. In some embodiments, a reference composition comprising oligonucleotides having no natural phosphate linkages.

[1515] In some embodiments, a reference composition is a composition comprising a reference plurality of oligonucleotides wherein individual oligonucleotides within the reference plurality differ from one another in stereochemical structure. In some embodiments, a reference composition is a composition comprising a reference plurality of oligonucleotides, wherein at least some oligonucleotides within the reference plurality have a structure different from a structure represented by a plurality of oligonucleotides of a composition compared to the reference composition.

[1516] In some embodiments, a reference oligonucleotide composition comprises a reference plurality of oligonucleotides capable of directing single-stranded RNA interference and having the same common nucleotide sequence but lacking at least one of the one or more modified sugar moieties in oligonucleotides of the oligonucleotide composition compared to the reference composition. In some embodiments, a reference oligonucleotide composition comprises a reference plurality of oligonucleotides capable of directing single-stranded RNA interference and having the same common nucleotide sequence but have no modified sugar moieties. In some embodiments, a reference oligonucleotide composition comprises a reference plurality of oligonucleotides capable of directing single-stranded RNA interference and having the same common nucleotide sequence but do not comprise natural phosphate linkages. In some embodiments, a reference composition is an APOC3 oligonucleotide or a single-stranded RNAi agent of oligonucleotides having the same chemical modification patterns. In some embodiments, a reference composition is an APOC3 oligonucleotide or a single-stranded RNAi agent of another stereoisomer.

[1517] In some embodiments, a reference oligonucleotide composition of a provided oligonucleotide composition is a comparable composition absence of the lipids in the provided composition. In some embodiments, a reference oligonucleotide composition is a stereorandom oligonucleotide composition. In some embodiments, a reference oligonucleotide composition is a stereorandom composition of oligonucleotides of which all internucleotidic linkages are phosphorothioate. In some embodiments, a reference oligonucleotide composition is a DNA oligonucleotide composition with all phosphate linkages. In some embodiments, a reference composition is a composition of oligonucleotides having the same base sequence and the same chemical modifications. In some embodiments, a reference composition is a composition of oligonucleotides having the same base sequence and the same pattern of chemical modifications. In some embodiments, a reference composition is a chirally un-controlled (or stereorandom) composition of oligonucleotides having the same base sequence and chemical modifications. In some embodiments, a reference composition is a composition of oligonucleotides having the same base sequence but different chemical modifications. In some embodiments, a reference composition is a composition of oligonucleotides having the same base sequence, base modifications, internucleotidic linkage modifications but different sugar modifications. In some embodiments, a reference composition has fewer 2′-modified sugar modifications. In some embodiments, a reference composition is a composition of oligonucleotides having the same base sequence, base modifications, sugar modifications but different internucleotidic linkage modifications. In some embodiments, a reference composition has more internucleotidic linkage modifications. In some embodiments, a reference composition has fewer natural phosphate linkages. In some embodiments, a reference composition comprising oligonucleotides having no natural phosphate linkages. In some embodiments, a reference composition is a composition comprising a reference plurality of oligonucleotides wherein individual oligonucleotides within the reference plurality differ from one another in stereochemical structure. In some embodiments, a reference composition is a composition comprising a reference plurality of oligonucleotides, wherein at least some oligonucleotides within the reference plurality have a structure different from a structure represented by a plurality of oligonucleotides of a composition compared to the reference composition. In some embodiments, a reference oligonucleotide composition comprises a reference plurality of oligonucleotides capable of directing single-stranded RNA interference and having the same common nucleotide sequence but lacking at least one of the one or more modified sugar moieties in oligonucleotides of the oligonucleotide composition compared to the reference composition. In some embodiments, a reference oligonucleotide composition comprises a reference plurality of oligonucleotides capable of directing single-stranded RNA interference and having the same common nucleotide sequence but have no modified sugar moieties. In some embodiments, a reference oligonucleotide composition comprises a reference plurality of oligonucleotides capable of directing single-stranded RNA interference and having the same common nucleotide sequence but do not comprise natural phosphate linkages. In some embodiments, a reference composition is an APOC3 oligonucleotide or a single-stranded RNAi agent of oligonucleotides having the same chemical modification patterns. In some embodiments, a reference composition is an APOC3 oligonucleotide or a single-stranded RNAi agent of another stereoisomer.

[1518] In some embodiments, oligonucleotides of the first plurality comprise one or more structural elements (e.g., modifications, stereochemistry, patterns, etc.) that oligonucleotides of the reference plurality do not all have. Such structural elements can be any one described in this disclosure.

[1519] In some embodiments, oligonucleotides of the first plurality comprise more phosphorothioate linkages tha APOC3 oligonucleotides of the reference composition. In some embodiments, oligonucleotides of the first plurality comprise more phosphorothioate linkages tha APOC3 oligonucleotides of the reference composition at the 5′-end region. In some embodiments, oligonucleotides of the first plurality comprise more phosphorothioate linkages tha APOC3 oligonucleotides of the reference composition at the 3′-end region. In some embodiments, oligonucleotides of the first plurality comprise more Sp chiral internucleotidic linkages tha APOC3 oligonucleotides of the reference composition. In some embodiments, oligonucleotides of the first plurality comprise more Sp phosphorothioate linkages tha APOC3 oligonucleotides of the reference composition. In some embodiments, oligonucleotides of the first plurality comprise more Sp phosphorothioate linkages tha APOC3 oligonucleotides of the reference composition at the 5′-end region. In some embodiments, oligonucleotides of the first plurality comprise more Sp phosphorothioate linkages tha APOC3 oligonucleotides of the reference composition at the 3′-end region. In some embodiments, oligonucleotides of the first plurality comprise more modified bases tha APOC3 oligonucleotides of the reference composition. In some embodiments, oligonucleotides of the first plurality comprise more methylated bases tha APOC3 oligonucleotides of the reference composition. In some embodiments, oligonucleotides of the first plurality comprise more methylated bases tha APOC3 oligonucleotides of the reference composition at the 5′-end region. In some embodiments, oligonucleotides of the first plurality comprise more methylated bases tha APOC3 oligonucleotides of the reference composition at the 3′-end region. In some embodiments, oligonucleotides of the first plurality comprise fewer 2′-MOE modifications tha APOC3 oligonucleotides of the reference composition. In some embodiments, oligonucleotides of the first plurality comprise fewer 2′-MOE modifications tha APOC3 oligonucleotides of the reference composition. In some embodiments, oligonucleotides of the first plurality comprise fewer 2′-MOE modifications tha APOC3 oligonucleotides of the reference composition at the 5′-end region. In some embodiments, oligonucleotides of the first plurality comprise fewer 2′-MOE modifications tha APOC3 oligonucleotides of the reference composition at the 3′-end region. In some embodiments, individual oligonucleotides within the reference plurality differ from one another in stereochemical structure. In some embodiments, at least some oligonucleotides within the reference plurality have a structure different from a structure represented by the plurality of oligonucleotides of the composition. In some embodiments, the reference composition is a substantially racemic preparation of oligonucleotides that share the base sequence. In some embodiments, the reference composition is an APOC3 oligonucleotide or a single-stranded RNAi agent of another oligonucleotide type. In some embodiments, oligonucleotides of the reference composition comprise more phosphorothioate linkages. In some embodiments, oligonucleotides of the reference composition comprise only phosphorothioate linkages. In some embodiments, oligonucleotides of the reference composition comprise fewer modified sugar moieties. In some embodiments, oligonucleotides of the reference composition comprise fewer modified sugar moieties, wherein the modification is 2′-OR¹. In some embodiments, oligonucleotides of the reference composition comprise more modified sugar moieties. In some embodiments, oligonucleotides of the reference composition comprise more modified sugar moieties, the modification is 2′-OR¹. In some embodiments, oligonucleotides of the reference composition comprise fewer phosphorothioate linkages. In some embodiments, oligonucleotides of the reference composition comprise fewer methylated bases. In some embodiments, oligonucleotides of the reference composition comprise more 2′-MOE modifications. In some embodiments, oligonucleotides of the reference composition comprise fewer natural phosphate linkages. In some embodiments, oligonucleotides of the reference composition comprise fewer natural phosphate linkages at the 5′- and/or 3′-end region In some embodiments, oligonucleotides of a provided composition comprise fewer 2′-MOE modifications tha APOC3 oligonucleotides of the reference composition. In some embodiments, oligonucleotides of a provided composition comprise fewer 2′-MOE modifications tha APOC3 oligonucleotides of the reference composition. In some embodiments, oligonucleotides of a provided composition comprise fewer 2′-MOE modifications tha APOC3 oligonucleotides of the reference composition at the 5′-end region. In some embodiments, oligonucleotides of a provided composition comprise fewer 2′-MOE modifications tha APOC3 oligonucleotides of the reference composition at the 3′-end region. In some embodiments, individual oligonucleotides within the reference plurality differ from one another in stereochemical structure. In some embodiments, at least some oligonucleotides within the reference plurality have a structure different from a structure represented by the plurality of oligonucleotides of the composition. In some embodiments, the reference composition is a substantially racemic preparation of oligonucleotides that share the base sequence. In some embodiments, the reference composition is an APOC3 oligonucleotide or a single-stranded RNAi agent of another oligonucleotide type. In some embodiments, oligonucleotides of the reference composition comprise more phosphorothioate linkages. In some embodiments, oligonucleotides of the reference composition comprise only phosphorothioate linkages. In some embodiments, oligonucleotides of the reference composition comprise fewer modified sugar moieties. In some embodiments, oligonucleotides of the reference composition comprise fewer modified sugar moieties, wherein the modification is 2′-OR¹. In some embodiments, oligonucleotides of the reference composition comprise more modified sugar moieties. In some embodiments, oligonucleotides of the reference composition comprise more modified sugar moieties, the modification is 2′-OR¹. In some embodiments, oligonucleotides of the reference composition comprise fewer phosphorothioate linkages. In some embodiments, oligonucleotides of the reference composition comprise fewer methylated bases. In some embodiments, oligonucleotides of the reference composition comprise more 2′-MOE modifications. In some embodiments, oligonucleotides of the reference composition comprise fewer natural phosphate linkages. In some embodiments, oligonucleotides of the reference composition comprise fewer natural phosphate linkages at the 5′- and/or 3′-end region. In some embodiments, oligonucleotides of a reference plurality comprise fewer nucleotidic units comprising —F. In some embodiments, oligonucleotides of a reference plurality comprise fewer 2′-F modified sugar moieties. In some embodiments, oligonucleotides of a reference plurality comprise fewer chirally controlled modified internucleotidic linkages.

[1520] In some embodiments, provided chirally controlled oligonucleotide compositions comprises oligonucleotides of one oligonucleotide type. In some embodiments, provided chirally controlled oligonucleotide compositions comprises oligonucleotides of only one oligonucleotide type. In some embodiments, provided chirally controlled oligonucleotide compositions has oligonucleotides of only one oligonucleotide type. In some embodiments, provided chirally controlled oligonucleotide compositions comprises oligonucleotides of two or more oligonucleotide types. In some embodiments, using such compositions, provided methods can target more than one target. In some embodiments, an APOC3 oligonucleotide or a single-stranded RNAi agent comprising two or more oligonucleotide types targets two or more targets. In some embodiments, an APOC3 oligonucleotide or a single-stranded RNAi agent comprising two or more oligonucleotide types targets two or more mismatches. In some embodiments, a single oligonucleotide type targets two or more targets, e.g., mutations. In some embodiments, a target region of oligonucleotides of one oligonucleotide type comprises two or more “target sites” such as two mutations or SNPs.

[1521] In some embodiments, oligonucleotides in a provided chirally controlled oligonucleotide composition optionally comprise modified bases or sugars. In some embodiments, a provided chirally controlled oligonucleotide composition does not have any modified bases or sugars. In some embodiments, a provided chirally controlled oligonucleotide composition does not have any modified bases. In some embodiments, oligonucleotides in a provided chirally controlled oligonucleotide composition comprise modified bases and sugars. In some embodiments, oligonucleotides in a provided chirally controlled oligonucleotide composition comprise a modified base. In some embodiments, oligonucleotides in a provided chirally controlled oligonucleotide composition comprise a modified sugar. Modified bases and sugars for oligonucleotides are widely known in the art, including but not limited in those described in the present disclosure. In some embodiments, a modified base is 5-mC. In some embodiments, a modified sugar is a 2′-modified sugar. Suitable 2′-modification of oligonucleotide sugars are widely known by a person having ordinary skill in the art. In some embodiments, 2′-modifications include but are not limited to 2′-OR¹, wherein R¹ is not hydrogen. In some embodiments, a 2′-modification is 2′-OR¹, wherein R¹ is optionally substituted C₁₋₆ aliphatic. In some embodiments, a 2′-modification is 2′-MOE. In some embodiments, a modification is 2′-halogen. In some embodiments, a modification is 2′-F. In some embodiments, modified bases or sugars may further enhance activity, stability and/or selectivity of a chirally controlled oligonucleotide composition, whose common pattern of backbone chiral centers provides unexpected activity, stability and/or selectivity.

[1522] In some embodiments, a provided chirally controlled oligonucleotide composition does not have any modified sugars. In some embodiments, a provided chirally controlled oligonucleotide composition does not have any 2′-modified sugars. In some embodiments, the present disclosure surprising found that by using chirally controlled oligonucleotide compositions, modified sugars are not needed for stability, activity, and/or control of cleavage patterns. Furthermore, in some embodiments, the present disclosure surprisingly found that chirally controlled oligonucleotide compositions of oligonucleotides without modified sugars deliver better properties in terms of stability, activity, turn-over and/or control of cleavage patterns. For example, in some embodiments, it is surprising found that chirally controlled oligonucleotide compositions of oligonucleotides having no modified sugars dissociates much faster from cleavage products and provide significantly increased turn-over than compositions of oligonucleotides with modified sugars.

[1523] As discussed in detail herein, the present disclosure provides, among other things, a chirally controlled oligonucleotide composition, meaning that the composition contains a plurality of oligonucleotides of at least one type. Each oligonucleotide molecule of a particular “type” is comprised of preselected (e.g., predetermined) structural elements with respect to: (1) base sequence; (2) pattern of backbone linkages; (3) pattern of backbone chiral centers; and (4) pattern of backbone P-modification moieties. In some embodiments, provided oligonucleotide compositions contain oligonucleotides that are prepared in a single synthesis process. In some embodiments, provided compositions contain oligonucleotides having more than one chiral configuration within a single oligonucleotide molecule (e.g., where different residues along the oligonucleotide have different stereochemistry); in some such embodiments, such oligonucleotides may be obtained in a single synthesis process, without the need for secondary conjugation steps to generate individual oligonucleotide molecules with more than one chiral configuration.

[1524] Oligonucleotide compositions as provided herein can be used as single-stranded RNAi agents. In addition, oligonucleotide compositions as provided herein can be used as reagents for research and/or diagnostic purposes. One of ordinary skill in the art will readily recognize that the present disclosure disclosure herein is not limited to particular use but is applicable to any situations where the use of synthetic oligonucleotides is desirable. Among other things, provided compositions are useful in a variety of therapeutic, diagnostic, agricultural, and/or research applications.

[1525] In some embodiments, provided oligonucleotide compositions comprise oligonucleotides and/or residues thereof that include one or more structural modifications as described in detail herein. In some embodiments, provided oligonucleotide compositions comprise oligonucleotides that contain one or more modified nucleotides. In some embodiments, provided oligonucleotide compositions comprise oligonucleotides that contain one or more artificial nucleic acids or residues, including but not limited to: peptide nucleic acids (PNA), Morpholino and locked nucleic acids (LNA), glycon nucleic acids (GNA), threose nucleic acids (TNA), Xeno nucleic acids (XNA), manitol nucleic acid (MNA), anitol nucleic acid (ANA), and F-HNA, and any combination thereof. In some embodiments, a provided oligonucleotide comprises a Morpholino as described in Braasch et al. 2002 Biochem. 41: 4503-4510, or U.S. Pat. Nos. 5,698,685; 5,166,315; 5,185,444; or 5,034,506. In some embodiments, a provided oligonucleotide comprises a F-HNA as described in U.S. Pat. Nos. 8,088,904; 8,440,803; or 8,796,437; or in WO 2017/011276. Various modified nucleotides, including modified sugars are described in, for example, WO 2016/154096 and WO 2016/141236.

[1526] In any of the embodiments, the disclosure is useful for oligonucleotide-based modulation of gene expression, immune response, etc. Accordingly, stereo-defined, oligonucleotide compositions of the disclosure, which contain oligonucleotides of predetermined type (i.e., which are chirally controlled, and optionally chirally pure), can be used in lieu of conventional stereo-random or chirally impure counterparts. In some embodiments, provided compositions show enhanced intended effects and/or reduced unwanted side effects. Certain embodiments of biological and clinical/therapeutic applications of the disclosure are discussed explicitly below.

[1527] Various dosing regimens can be utilized to administer provided chirally controlled oligonucleotide compositions. In some embodiments, multiple unit doses are administered, separated by periods of time. In some embodiments, a given composition has a recommended dosing regimen, which may involve one or more doses. In some embodiments, a dosing regimen comprises a plurality of doses each of which are separated from one another by a time period of the same length; in some embodiments, a dosing regimen comprises a plurality of doses and at least two different time periods separating individual doses. In some embodiments, all doses within a dosing regimen are of the same unit dose amount. In some embodiments, different doses within a dosing regimen are of different amounts. In some embodiments, a dosing regimen comprises a first dose in a first dose amount, followed by one or more additional doses in a second dose amount different from the first dose amount. In some embodiments, a dosing regimen comprises a first dose in a first dose amount, followed by one or more additional doses in a second (or subsequent) dose amount that is same as or different from the first dose (or another prior dose) amount. In some embodiments, a dosing regimen comprises administering at least one unit dose for at least one day. In some embodiments, a dosing regimen comprises administering more than one dose over a time period of at least one day, and sometimes more than one day. In some embodiments, a dosing regimen comprises administering multiple doses over a time period of at least week. In some embodiments, the time period is at least 2, 3, 4, 5, 6, 7, 8, 9, 10, 11, 12, 13, 14, 15, 16, 17, 18, 19, 20, 21, 22, 23 24, 25, 26, 27, 28, 29, 30, 31, 32, 33, 34, 35, 36, 37, 38, 39, 40 or more (e.g., about 45, 50, 55, 60, 65, 70, 75, 80, 85, 90, 95, 100 or more) weeks. In some embodiments, a dosing regimen comprises administering one dose per week for more than one week. In some embodiments, a dosing regimen comprises administering one dose per week for 2, 3, 4, 5, 6, 7, 8, 9, 10, 11, 12, 13, 14, 15, 16, 17, 18, 19, 20, 21, 22, 23 24, 25, 26, 27, 28, 29, 30, 31, 32, 33, 34, 35, 36, 37, 38, 39, 40 or more (e.g., about 45, 50, 55, 60, 65, 70, 75, 80, 85, 90, 95, 100 or more) weeks. In some embodiments, a dosing regimen comprises administering one dose every two weeks for more than two week period. In some embodiments, a dosing regimen comprises administering one dose every two weeks over a time period of 2, 3, 4, 5, 6, 7, 8, 9, 10, 11, 12, 13, 14, 15, 16, 17, 18, 19, 20, 21, 22, 23 24, 25, 26, 27, 28, 29, 30, 31, 32, 33, 34, 35, 36, 37, 38, 39, 40 or more (e.g., about 45, 50, 55, 60, 65, 70, 75, 80, 85, 90, 95, 100 or more) weeks. In some embodiments, a dosing regimen comprises administering one dose per month for one month. In some embodiments, a dosing regimen comprises administering one dose per month for more than one month. In some embodiments, a dosing regimen comprises administering one dose per month for 2, 3, 4, 5, 6, 7, 8, 9, 10, 11, 12, or more months. In some embodiments, a dosing regimen comprises administering one dose per week for about 10 weeks. In some embodiments, a dosing regimen comprises administering one dose per week for about 20 weeks. In some embodiments, a dosing regimen comprises administering one dose per week for about 30 weeks. In some embodiments, a dosing regimen comprises administering one dose per week for 26 weeks. In some embodiments, an APOC3 oligonucleotide or a single-stranded RNAi agent is administered according to a dosing regimen that differs from that utilized for a chirally uncontrolled (e.g., stereorandom) oligonucleotide composition of the same sequence, and/or of a different chirally controlled oligonucleotide composition of the same sequence. In some embodiments, an APOC3 oligonucleotide or a single-stranded RNAi agent is administered according to a dosing regimen that is reduced as compared with that of a chirally uncontrolled (e.g., stereorandom) oligonucleotide composition of the same sequence in that it achieves a lower level of total exposure over a given unit of time, involves one or more lower unit doses, and/or includes a smaller number of doses over a given unit of time. In some embodiments, an APOC3 oligonucleotide or a single-stranded RNAi agent is administered according to a dosing regimen that extends for a longer period of time than does that of a chirally uncontrolled (e.g., stereorandom) oligonucleotide composition of the same sequence Without wishing to be limited by theory, Applicant notes that in some embodiments, the shorter dosing regimen, and/or longer time periods between doses, may be due to the improved stability, bioavailability, and/or efficacy of a chirally controlled oligonucleotide composition. In some embodiments, an APOC3 oligonucleotide or a single-stranded RNAi agent has a longer dosing regimen compared to the corresponding chirally uncontrolled oligonucleotide composition. In some embodiments, an APOC3 oligonucleotide or a single-stranded RNAi agent has a shorter time period between at least two doses compared to the corresponding chirally uncontrolled oligonucleotide composition. Without wishing to be limited by theory, Applicant notes that in some embodiments longer dosing regimen, and/or shorter time periods between doses, may be due to the improved safety of a chirally controlled oligonucleotide composition.

[1528] In some embodiments, with their improved delivery (and other properties), provided compositions can be administered in lower dosages and/or with lower frequency to achieve biological effects, for example, clinical efficacy.

[1529] A single dose can contain various amounts of oligonucleotides. In some embodiments, a single dose can contain various amounts of a type of chirally controlled oligonucleotide, as desired suitable by the application. In some embodiments, a single dose contains about 1, 5, 10, 20, 30, 40, 50, 60, 70, 80, 90, 100, 110, 120, 130, 140, 150, 160, 170, 180, 190, 200, 210, 220, 230, 240, 250, 260, 270, 280, 290, 300 or more (e.g., about 350, 400, 450, 500, 550, 600, 650, 700, 750, 800, 850, 900, 950, 1000 or more) mg of a type of chirally controlled oligonucleotide. In some embodiments, a single dose contains about 1 mg of a type of chirally controlled oligonucleotide. In some embodiments, a single dose contains about 5 mg of a type of chirally controlled oligonucleotide. In some embodiments, a single dose contains about 10 mg of a type of chirally controlled oligonucleotide. In some embodiments, a single dose contains about 15 mg of a type of chirally controlled oligonucleotide. In some embodiments, a single dose contains about 20 mg of a type of chirally controlled oligonucleotide. In some embodiments, a single dose contains about 50 mg of a type of chirally controlled oligonucleotide. In some embodiments, a single dose contains about 100 mg of a type of chirally controlled oligonucleotide. In some embodiments, a single dose contains about 150 mg of a type of chirally controlled oligonucleotide. In some embodiments, a single dose contains about 200 mg of a type of chirally controlled oligonucleotide. In some embodiments, a single dose contains about 250 mg of a type of chirally controlled oligonucleotide. In some embodiments, a single dose contains about 300 mg of a type of chirally controlled oligonucleotide. In some embodiments, a chirally controlled oligonucleotide is administered at a lower amount in a single dose, and/or in total dose, than a chirally uncontrolled oligonucleotide. In some embodiments, a chirally controlled oligonucleotide is administered at a lower amount in a single dose, and/or in total dose, than a chirally uncontrolled oligonucleotide due to improved efficacy. In some embodiments, a chirally controlled oligonucleotide is administered at a higher amount in a single dose, and/or in total dose, than a chirally uncontrolled oligonucleotide. In some embodiments, a chirally controlled oligonucleotide is administered at a higher amount in a single dose, and/or in total dose, than a chirally uncontrolled oligonucleotide due to improved safety.

### Biologically Active Oligonucleotides

[1530] In some embodiments, the present disclosure encompasses oligonucleotides which capable of acting as single-stranded RNAi agents.

[1531] In some embodiments, provided compositions include one or more oligonucleotides fully or partially complementary to strand of: structural genes, genes control and/or termination regions, and/or self-replicating systems such as viral or plasmid DNA. In some embodiments, provided compositions include one or more oligonucleotides that are or act as RNAi agents or other RNA interference reagents (RNAi agents or iRNA agents), shRNA, antisense oligonucleotides, self-cleaving RNAs, ribozymes, fragment thereof and/or variants thereof (such as Peptidyl transferase 23S rRNA, RNase P, Group I and Group II introns, GIR1 branching ribozymes, Leadzyme, Hairpin ribozymes, Hammerhead ribozymes, HDV ribozymes, Mammalian CPEB3 ribozyme, VS ribozymes, glmS ribozymes, CoTC ribozyme, etc.), microRNAs, microRNA mimics, supermirs, aptamers, antimirs, antagomirs, Ul adaptors, triplex-forming oligonucleotides, RNA activators, long non-coding RNAs, short non-coding RNAs (e.g., piRNAs), immunomodulatory oligonucleotides (such as immunostimulatory oligonucleotides, immunoinhibitory oligonucleotides), GNA, LNA, ENA, PNA, TNA, morpholinos, G-quadruplex (RNA and DNA), antiviral oligonucleotides, and decoy oligonucleotides.

[1532] In some embodiments, provided compositions include one or more hybrid (e.g., chimeric) oligonucleotides. In the context of the present disclosure, the term “hybrid” broadly refers to mixed structural elements of oligonucleotides. Hybrid oligonucleotides may refer to, for example, (1) an APOC3 oligonucleotide molecule having mixed classes of nucleotides, e.g., part DNA and part RNA within the single molecule (e.g., DNA-RNA); (2) complementary pairs of nucleic acids of different classes, such that DNA:RNA base pairing occurs either intramolecularly or intermolecularly; or both; (3) an APOC3 oligonucleotide with two or more kinds of the backbone or internucleotide linkages.

[1533] In some embodiments, provided compositions include one or more oligonucleotide that comprises more than one classes of nucleic acid residues within a single molecule. For example, in any of the embodiments described herein, an APOC3 oligonucleotide may comprise a DNA portion and an RNA portion. In some embodiments, an APOC3 oligonucleotide may comprise a unmodified portion and modified portion.

[1534] Provided oligonucleotide compositions can include oligonucleotides containing any of a variety of modifications, for example as described herein. In some embodiments, particular modifications are selected, for example, in light of intended use. In some embodiments, it is desirable to modify one or both strands of a double-stranded oligonucleotide (or a double-stranded portion of a single-stranded oligonucleotide). In some embodiments, the two strands (or portions) include different modifications. In some embodiments, the two strands include the same modifications. One of skill in the art will appreciate that the degree and type of modifications enabled by methods of the present disclosure allow for numerous permutations of modifications to be made. Examples of such modifications are described herein and are not meant to be limiting.

[1535] The phrase “antisense strand” as used herein, refers to an APOC3 oligonucleotide that is substantially or 100% complementary to a target sequence of interest. The phrase “antisense strand” includes the antisense region of both oligonucleotides that are formed from two separate strands, as well as unimolecular oligonucleotides that are capable of forming hairpin or dumbbell type structures. In reference to a double-stranded RNAi agent such as a siRNA, the antisense strand is the strand preferentially incorporated into RISC, and which targets RISC-mediated knockdown of a RNA target. In reference to a double-stranded RNAi agent, the terms “antisense strand” and “guide strand” are used interchangeably herein; and the terms “sense strand” or “passenger strand” are used interchangeably herein in reference to the strand which is not the antisense strand.

[1536] The phrase “sense strand” refers to an APOC3 oligonucleotide that has the same nucleoside sequence, in whole or in part, as a target sequence such as a messenger RNA or a sequence of DNA.

[1537] By “target sequence” is meant any nucleic acid sequence whose expression or activity is to be modulated. The target nucleic acid can be DNA or RNA, such as endogenous DNA or RNA, viral DNA or viral RNA, or other RNA encoded by a gene, virus, bacteria, fungus, mammal, or plant. In some embodiments, a target sequence is associated with a disease or disorder. In reference to RNA interference and RNase H-mediated knockdown, a target sequence is generally a RNA target sequence.

[1538] By “specifically hybridizable” and “complementary” is meant that a nucleic acid can form hydrogen bond(s) with another nucleic acid sequence by either traditional Watson-Crick or other non-traditional types. In reference to the nucleic molecules of the present disclosure, the binding free energy for a nucleic acid molecule with its complementary sequence is sufficient to allow the relevant function of the nucleic acid to proceed, e.g., RNAi activity. Determination of binding free energies for nucleic acid molecules is well known in the art (see, e.g., Turner et al, 1987, CSH Symp. Quant. Biol. LIT pp. 123-133; Frier et al., 1986, Proc. Nat. Acad. Sci. USA 83: 9373-9377; Turner et al., 1987, J. Am. Chem. Soc. 109:3783-3785)

[1539] A percent complementarity indicates the percentage of contiguous residues in a nucleic acid molecule that can form hydrogen bonds (e.g., Watson-Crick base pairing) with a second nucleic acid sequence (e.g., 5, 6, 7, 8, 9, 10 out of 10 being 50%, 60%, 70%, 80%, 90%, and 100% complementary). “Perfectly complementary” or 100% complementarity means that all the contiguous residues of a nucleic acid sequence will hydrogen bond with the same number of contiguous residues in a second nucleic acid sequence. Less than perfect complementarity refers to the situation in which some, but not all, nucleoside units of two strands can hydrogen bond with each other. “Substantial complementarity” refers to polynucleotide strands exhibiting 90% or greater complementarity, excluding regions of the polynucleotide strands, such as overhangs, that are selected so as to be noncomplementary. Specific binding requires a sufficient degree of complementarity to avoid non-specific binding of the oligomeric compound to non-target sequences under conditions in which specific binding is desired, e.g., under physiological conditions in the case of in vivo assays or therapeutic treatment, or in the case of in vitro assays, under conditions in which the assays are performed. In some embodiments, non-target sequences differ from corresponding target sequences by at least 5 nucleotides.

[1540] When used as therapeutics, a provided oligonucleotide is administered as a pharmaceutical composition. In some embodiments, the pharmaceutical composition comprises a therapeutically effective amount of a provided oligonucleotide comprising, or a pharmaceutically acceptable salt thereof, and at least one pharmaceutically acceptable inactive ingredient selected from pharmaceutically acceptable diluents, pharmaceutically acceptable excipients, and pharmaceutically acceptable carriers. In some embodiments, the pharmaceutical composition is formulated for intravenous injection, oral administration, buccal administration, inhalation, nasal administration, topical administration, ophthalmic administration or otic administration. In further embodiments, the pharmaceutical composition is a tablet, a pill, a capsule, a liquid, an inhalant, a nasal spray solution, a suppository, a suspension, a gel, a colloid, a dispersion, a suspension, a solution, an emulsion, an ointment, a lotion, an eye drop or an ear drop.

### Pharmaceutical Compositions

[1541] When used as therapeutics, a provided oligonucleotide or oligonucleotide composition described herein is administered as a pharmaceutical composition. In some embodiments, the pharmaceutical composition comprises a therapeutically effective amount of a provided oligonucleotides, or a pharmaceutically acceptable salt thereof, and at least one pharmaceutically acceptable inactive ingredient selected from pharmaceutically acceptable diluents, pharmaceutically acceptable excipients, and pharmaceutically acceptable carriers. In some embodiments, the pharmaceutical composition is formulated for intravenous injection, oral administration, buccal administration, inhalation, nasal administration, topical administration, ophthalmic administration or otic administration. In some embodiments, the pharmaceutical composition is a tablet, a pill, a capsule, a liquid, an inhalant, a nasal spray solution, a suppository, a suspension, a gel, a colloid, a dispersion, a suspension, a solution, an emulsion, an ointment, a lotion, an eye drop or an ear drop.

[1542] In some embodiments, the present disclosure provides a pharmaceutical composition comprising chirally controlled oligonucleotide, or composition thereof, in admixture with a pharmaceutically acceptable excipient. One of skill in the art will recognize that the pharmaceutical compositions include the pharmaceutically acceptable salts of the chirally controlled oligonucleotide, or composition thereof, described above.

[1543] A variety of supramolecular nanocarriers can be used to deliver nucleic acids. Example nanocarriers include, but are not limited to liposomes, cationic polymer complexes and various polymeric. Complexation of nucleic acids with various polycations is another approach for intracellular delivery; this includes use of PEGlyated polycations, polyethyleneamine (PEI) complexes, cationic block co-polymers, and dendrimers. Several cationic nanocarriers, including PEI and polyamidoamine dendrimers help to release contents from endosomes. Other approaches include use of polymeric nanoparticles, microspheres, liposomes, dendrimers, biodegradable polymers, conjugates, prodrugs, inorganic colloids such as sulfur or iron, antibodies, implants, biodegradable implants, biodegradable microspheres, osmotically controlled implants, lipid nanoparticles, emulsions, oily solutions, aqueous solutions, biodegradable polymers, poly(lactide-coglycolic acid), poly(lactic acid), liquid depot, polymer micelles, quantum dots and lipoplexes. In some embodiments, an APOC3 oligonucleotide is conjugated to another molecular.

[1544] Additional nucleic acid delivery strategies are known in addition to the example delivery strategies described herein.

[1545] In therapeutic and/or diagnostic applications, the compounds of the disclosure can be formulated for a variety of modes of administration, including systemic and topical or localized administration. Techniques and formulations generally may be found in Remington, The Science and Practice of Pharmacy, (20th ed. 2000).

[1546] Provided oligonucleotides, and compositions thereof, are effective over a wide dosage range. For example, in the treatment of adult humans, dosages from about 0.01 to about 1000 mg, from about 0.5 to about 100 mg, from about 1 to about 50 mg per day, and from about 5 to about 100 mg per day are examples of dosages that may be used. The exact dosage will depend upon the route of administration, the form in which the compound is administered, the subject to be treated, the body weight of the subject to be treated, and the preference and experience of the attending physician.

[1547] Pharmaceutically acceptable salts are generally well known to those of ordinary skill in the art, and may include, by way of example but not limitation, acetate, benzenesulfonate, besylate, benzoate, bicarbonate, bitartrate, bromide, calcium edetate, carnsylate, carbonate, citrate, edetate, edisylate, estolate, esylate, fumarate, gluceptate, gluconate, glutamate, glycollylarsanilate, hexylresorcinate, hydrabamine, hydrobromide, hydrochloride, hydroxynaphthoate, iodide, isethionate, lactate, lactobionate, malate, maleate, mandelate, mesylate, mucate, napsylate, nitrate, pamoate (embonate), pantothenate, phosphate/diphosphate, polygalacturonate, salicylate, stearate, subacetate, succinate, sulfate, tannate, tartrate, or teoclate. Other pharmaceutically acceptable salts may be found in, for example, Remington, The Science and Practice of Pharmacy (20th ed. 2000). Preferred pharmaceutically acceptable salts include, for example, acetate, benzoate, bromide, carbonate, citrate, gluconate, hydrobromide, hydrochloride, maleate, mesylate, napsylate, pamoate (embonate), phosphate, salicylate, succinate, sulfate, or tartrate.

[1548] In some embodiments, a provided single-stranded RNAi agent is formulated in a pharmaceutical composition described in U.S. Applications No. 61/774,759; 61/918,175, filed Dec. 19, 2013; 61/918,927; 61/918,182; 61/918,941; 62/025,224; 62/046,487; or International Applications No. PCT/US04/042911; PCT/EP2010/070412; or PCT/I B2014/059503.

[1549] Depending on the specific conditions being treated, such agents may be formulated into liquid or solid dosage forms and administered systemically or locally. The agents may be delivered, for example, in a timed- or sustained-low release form as is known to those skilled in the art. Techniques for formulation and administration may be found in Remington, The Science and Practice of Pharmacy (20th ed. 2000). Suitable routes may include oral, buccal, by inhalation spray, sublingual, rectal, transdermal, vaginal, transmucosal, nasal or intestinal administration; parenteral delivery, including intramuscular, subcutaneous, intramedullary injections, as well as intrathecal, direct intraventricular, intravenous, intra-articullar, intra-sternal, intra-synovial, intra-hepatic, intralesional, intracranial, intraperitoneal, intranasal, or intraocular injections or other modes of delivery.

[1550] For injection, the agents of the disclosure may be formulated and diluted in aqueous solutions, such as in physiologically compatible buffers such as Hank's solution, Ringer's solution, or physiological saline buffer. For such transmucosal administration, penetrants appropriate to the barrier to be permeated are used in the formulation. Such penetrants are generally known in the art.

[1551] Use of pharmaceutically acceptable inert carriers to formulate the compounds herein disclosed for the practice of the disclosure into dosages suitable for systemic administration is within the scope of the disclosure. With proper choice of carrier and suitable manufacturing practice, the compositions of the present disclosure, in particular, those formulated as solutions, may be administered parenterally, such as by intravenous injection.

[1552] The compounds can be formulated readily using pharmaceutically acceptable carriers well known in the art into dosages suitable for oral administration. Such carriers enable the compounds of the disclosure to be formulated as tablets, pills, capsules, liquids, gels, syrups, slurries, suspensions and the like, for oral ingestion by a subject (e.g., patient) to be treated.

[1553] For nasal or inhalation delivery, the agents of the disclosure may also be formulated by methods known to those of skill in the art, and may include, for example, but not limited to, examples of solubilizing, diluting, or dispersing substances such as, saline, preservatives, such as benzyl alcohol, absorption promoters, and fluorocarbons.

[1554] In certain embodiments, oligonucleotides and compositions are delivered to the CNS. In certain embodiments, oligonucleotides and compositions are delivered to the cerebrospinal fluid. In certain embodiments, oligonucleotides and compositions are administered to the brain parenchyma. In certain embodiments, oligonucleotides and compositions are delivered to an animal/subject by intrathecal administration, or intracerebroventricular administration. Broad distribution of oligonucleotides and compositions, described herein, within the central nervous system may be achieved with intraparenchymal administration, intrathecal administration, or intracerebroventricular administration.

[1555] In certain embodiments, parenteral administration is by injection, by, e.g., a syringe, a pump, etc. In certain embodiments, the injection is a bolus injection. In certain embodiments, the injection is administered directly to a tissue, such as striatum, caudate, cortex, hippocampus and cerebellum.

[1556] In certain embodiments, methods of specifically localizing a pharmaceutical agent, such as by bolus injection, decreases median effective concentration (EC50) by a factor of 20, 25, 30, 35, 40, 45 or 50. In certain embodiments, the pharmaceutical agent in an antisense compound as further described herein. In certain embodiments, the targeted tissue is brain tissue. In certain embodiments the targeted tissue is striatal tissue. In certain embodiments, decreasing EC50 is desirable because it reduces the dose required to achieve a pharmacological result in a patient in need thereof.

[1557] In certain embodiments, an antisense oligonucleotide is delivered by injection or infusion once every month, every two months, every 90 days, every 3 months, every 6 months, twice a year or once a year.

[1558] Pharmaceutical compositions suitable for use in the present disclosure include compositions wherein the active ingredients are contained in an effective amount to achieve its intended purpose. Determination of the effective amounts is well within the capability of those skilled in the art, especially in light of the detailed disclosure provided herein.

[1559] In addition to the active ingredients, these pharmaceutical compositions may contain suitable pharmaceutically acceptable carriers comprising excipients and auxiliaries which facilitate processing of an active compound into preparations which can be used pharmaceutically. The preparations formulated for oral administration may be in the form of tablets, dragees, capsules, or solutions.

[1560] Pharmaceutical preparations for oral use can be obtained by combining an active compound with solid excipients, optionally grinding a resulting mixture, and processing the mixture of granules, after adding suitable auxiliaries, if desired, to obtain tablets or dragee cores. Suitable excipients are, in particular, fillers such as sugars, including lactose, sucrose, mannitol, or sorbitol; cellulose preparations, for example, maize starch, wheat starch, rice starch, potato starch, gelatin, gum tragacanth, methyl cellulose, hydroxypropylmethyl-cellulose, sodium carboxymethyl-cellulose (CMC), and/or polyvinylpyrrolidone (PVP: povidone). If desired, disintegrating agents may be added, such as the cross-linked polyvinylpyrrolidone, agar, or alginic acid or a salt thereof such as sodium alginate.

[1561] Dragee cores are provided with suitable coatings. For this purpose, concentrated sugar solutions may be used, which may optionally contain gum arabic, talc, polyvinylpyrrolidone, carbopol gel, polyethylene glycol (PEG), and/or titanium dioxide, lacquer solutions, and suitable organic solvents or solvent mixtures. Dye-stuffs or pigments may be added to the tablets or dragee coatings for identification or to characterize different combinations of active compound doses.

[1562] Pharmaceutical preparations that can be used orally include push-fit capsules made of gelatin, as well as soft, sealed capsules made of gelatin, and a plasticizer, such as glycerol or sorbitol. The push-fit capsules can contain the active ingredients in admixture with filler such as lactose, binders such as starches, and/or lubricants such as talc or magnesium stearate and, optionally, stabilizers. In soft capsules, an active compound may be dissolved or suspended in suitable liquids, such as fatty oils, liquid paraffin, or liquid polyethylene glycols (PEGs). In addition, stabilizers may be added.

[1563] A composition can be obtained by combining an active compound with a lipid. In some embodiments, the lipid is conjugated to an active compound. In some embodiments, the lipid is not conjugated to an active compound. In some embodiments, a lipid comprises a C₁₀-C₄₀ linear, saturated or partially unsaturated, aliphatic chain. In some embodiments, a lipid comprises a C₁₀-C₄₀ linear, saturated or partially unsaturated, aliphatic chain, optionally substituted with one or more C₁₋₄ aliphatic group. In some embodiments, the lipid is selected from the group consisting of: lauric acid, myristic acid, palmitic acid, stearic acid, oleic acid, linoleic acid, alpha-linolenic acid, gamma-linolenic acid, docosahexaenoic acid (cis-DHA), turbinaric acid and dilinoleyl. In some embodiments, a lipid has a structure of any of:

[chemical structure]

[1564] In some embodiments, an active compound is any oligonucleotide or other nucleic acid described herein. In some embodiments, an active compound is a nucleic acid of a sequence comprising or consisting of any sequence of any nucleic acid listed in Table 1A. In some embodiments, a composition comprises a lipid and an an active compound, and further comprises another component selected from: another lipid, and a targeting compound or moiety. In some embodiments, a lipid includes, without limitation: an amino lipid; an amphipathic lipid; an anionic lipid; an apolipoprotein; a cationic lipid; a low molecular weight cationic lipid; a cationic lipid such as CLinDMA and DLinDMA; an ionizable cationic lipid; a cloaking component; a helper lipid; a lipopeptide; a neutral lipid; a neutral zwitterionic lipid; a hydrophobic small molecule; a hydrophobic vitamin; a PEG-lipid; an uncharged lipid modified with one or more hydrophilic polymers; phospholipid; a phospholipid such as 1,2-dioleoyl-sn-glycero-3-phosphoethanolamine; a stealth lipid; a sterol; a cholesterol; and a targeting lipid; and any other lipid described herein or reported in the art. In some embodiments, a composition comprises a lipid and a portion of another lipid capable of mediating at least one function of another lipid. In some embodiments, a targeting compound or moiety is capable of targeting a compound (e.g., a composition comprising a lipid and a active compound) to a particular cell or tissue or subset of cells or tissues. In some embodiments, a targeting moiety is designed to take advantage of cell- or tissue-specific expression of particular targets, receptors, proteins, or other subcellular components; In some embodiments, a targeting moiety is a ligand (e.g., a small molecule, antibody, peptide, protein, carbohydrate, aptamer, etc.) that targets a composition to a cell or tissue, and/or binds to a target, receptor, protein, or other subcellular component.

[1565] Certain example lipids for use in preparation of a composition for delivery of an active compound allow (e.g., do not prevent or interfere with) the function of an active compound. Non-limiting example lipids include: lauric acid, myristic acid, palmitic acid, stearic acid, oleic acid, linoleic acid, alpha-linolenic acid, gamma-linolenic acid, docosahexaenoic acid (cis-DHA), turbinaric acid and dilinoleyl.

[1566] As described in the present disclosure, lipid conjugation, such as conjugation with fatty acids, may improve one or more properties of oligonucleotides.

[1567] In some embodiments, a composition for delivery of an active compound is capable of targeting an active compound to particular cells or tissues, as desired. In some embodiments, a composition for delivery of an active compound is capable of targeting an active compound to a muscle cell or tissue. In some embodiments, the present disclosure pertains to compositions and methods related to delivery of active compounds, wherein the compositions comprise an active compound a lipid. In various embodiments to a muscle cell or tissue, the lipid is selected from: lauric acid, myristic acid, palmitic acid, stearic acid, oleic acid, linoleic acid, alpha-linolenic acid, gamma-linolenic acid, docosahexaenoic acid (cis-DHA), turbinaric acid and dilinoleyl. The example lipids used include stearic acid, oleic acid, alpha-linolenic acid, gamma-linolenic acids, cis-DHA, turbinaric acid and dilinoleyl acid. In these Tables, “TBD” indicates that the particular composition was effective for delivery, but the numerical results were outside the standard range, and thus the final results remain to be determined; however, the compositions indicated as “TBD” in the Tables were efficacious at delivery of an active compound.

[1568] A composition comprising an active compound and any of: stearic acid, oleic acid, alpha-linolenic acid, gamma-linolenic acid, cis-DHA or turbinaric acid, was able to deliver an active compound to gastrocnemius muscle tissue. A composition comprising an active compound and any of: stearic acid, alpha-linolenic, gamma-linolenic, cis-DHA, or turbinaric acid, was able to deliver an active compound to heart muscle tissue. A composition comprising an active compound and any of: stearic acid, oleic acid, alpha-linolenic acid, gamma-linolenic acid, cis-DHA or turbinaric acid, was able to deliver an active compound to quadriceps muscle tissue. A composition comprising an active compound and any of: stearic, oleic, alpha-linolenic, gamma-linolenic, cis-DHA, or turbinaric acid was able to deliver an active compound to the gastrocnemius muscle tissue. A composition comprising an active compound and any of: stearic acid, alpha-linolenic, gamma-linolenic, cis-DHA, or turbinaric acid was able to deliver an active compound to heart muscle tissue. A composition comprising an active compound and any of: dilinoleyl, stearic acid, oleic acid, alpha-linolenic, gamma-linolenic, cis-DHA or turbinaric acid was able to delivery an active compound to the diaphragm muscle tissue.

[1569] Thus: A composition comprising a lipid, selected from: lauric acid, myristic acid, palmitic acid, stearic acid, oleic acid, linoleic acid, alpha-linolenic acid, gamma-linolenic acid, docosahexaenoic acid (cis-DHA), turbinaric acid and dilinoleyl, and an active compound is capable of delivering an active compound to extra-hepatic cells and tissues, e.g., muscle cells and tissues.

[1570] Depending upon the particular condition, or disease state, to be treated or prevented, additional therapeutic agents, which are normally administered to treat or prevent that condition, may be administered together with oligonucleotides of this disclosure. For example, chemotherapeutic agents or other anti-proliferative agents may be combined with the oligonucleotides of this disclosure to treat proliferative diseases and cancer. Examples of known chemotherapeutic agents include, but are not limited to, adriamycin, dexamethasone, vincristine, cyclophosphamide, fluorouracil, topotecan, taxol, interferons, and platinum derivatives.

### Example Uses

[1571] In some embodiments, the present disclosure encompasses the use of a composition comprising a lipid and an APOC3 oligonucleotide or a single-stranded RNAi agent. In some embodiments, the present disclosure provides methods for delivering an APOC3 oligonucleotide or a single-stranded RNAi agent to a target location comprising administering a provided composition. In some embodiments, a provided method delivers an APOC3 oligonucleotide or a single-stranded RNAi agent into a cell. In some embodiments, a provided method delivers an APOC3 oligonucleotide or a single-stranded RNAi agent into a muscle cell. In some embodiments, a provided method delivers an APOC3 oligonucleotide or a single-stranded RNAi agent into a cell within a tissue. In some embodiments, a provided method delivers an APOC3 oligonucleotide or a single-stranded RNAi agent into a cell within an organ. In some embodiments, a provided method delivers an APOC3 oligonucleotide or a single-stranded RNAi agent into a cell within a subject, comprising administering to the subject a provided composition. In some embodiments, a provided method delivers an APOC3 oligonucleotide or a single-stranded RNAi agent into cytoplasm. In some embodiments, a provided method delivers an APOC3 oligonucleotide or a single-stranded RNAi agent into nucleus.

[1572] In some embodiments, the present disclosure pertains to methods related to the delivery of an APOC3 oligonucleotide or a single-stranded RNAi agent to a cell or tissue, or a cell or tissue in a mammal (e.g., a human subject), which method pertains to a use of a composition comprising a biological agent and a lipid. any one or more additional components selected from: a polynucleotide, a dye, an intercalating agent (e.g. an acridine), a cross-linker (e.g. psoralene, or mitomycin C), a porphyrin (e.g., TPPC4, texaphyrin, or Sapphyrin), a polycyclic aromatic hydrocarbon (e.g., phenazine, or dihydrophenazine), an artificial endonuclease, a chelating agent, EDTA, an alkylating agent, a phosphate, an amino, a mercapto, a PEG (e.g., PEG-40K), MPEG, [MPEG]₂, a polyamino, an alkyl, a substituted alkyl, a radiolabeled marker, an enzyme, a hapten (e.g. biotin), a transport/absorption facilitator (e.g., aspirin, vitamin E, or folic acid), a synthetic ribonuclease, a protein, e.g., a glycoprotein, or peptide, e.g., a molecule having a specific affinity for a co-ligand, or antibody e.g., an antibody, a hormone, a hormone receptor, a non-peptidic species, a lipid, a lectin, a carbohydrate, a vitamin, a cofactor, or a drug. In some embodiments, the present disclosure pertains to compositions or methods related to a composition comprising an APOC3 oligonucleotide or a single-stranded RNAi agent and a lipid comprising a C₁₀-C₆₀ linear, saturated or partially unsaturated, aliphatic chain. In some embodiments, the present disclosure pertains to compositions or methods related to a composition comprising an APOC3 oligonucleotide or a single-stranded RNAi agent and a lipid comprising a C₁₀-C₆₀ linear, saturated or partially unsaturated, aliphatic chain, optionally substituted with one or more C₁₋₄ aliphatic group. In some embodiments, the present disclosure provides chirally controlled oligonucleotide compositions and a lipid selected from the group consisting of: lauric acid, myristic acid, palmitic acid, stearic acid, oleic acid, linoleic acid, alpha-linolenic acid, gamma-linolenic acid, docosahexaenoic acid (cis-DHA), turbinaric acid and dilinoleyl, wherein the composition is suitable for delivery of the oligonucleotide to a muscle cell or tissue, or a muscle cell or tissue in a mammal (e.g., a human subject). In some embodiments, an APOC3 oligonucleotide or a single-stranded RNAi agent is an APOC3 oligonucleotide comprising one or more chiral internucleotidic linkages, and a provided composition is an APOC3 oligonucleotide or a single-stranded RNAi agent. In some embodiments, an APOC3 oligonucleotide or a single-stranded RNAi agent is an APOC3 oligonucleotide comprising one or more chiral internucleotidic linkages, and a provided composition is a non-chirally controlled oligonucleotide composition of the oligonucleotide.

[1573] In some embodiments, the present disclosure pertains to a method of delivering an APOC3 oligonucleotide or a single-stranded RNAi agent to a cell or tissue, wherein the method comprises steps of: providing a composition comprising an APOC3 oligonucleotide or a single-stranded RNAi agent and a lipid; and contacting the cell or tissue with the composition; in some embodiments, the present disclosure pertains to a method of administering an APOC3 oligonucleotide or a single-stranded RNAi agent to a subject, wherein the method comprises steps of: providing a composition comprising an APOC3 oligonucleotide or a single-stranded RNAi agent and a lipid; and administering the composition to the subject. In some embodiments, a lipid comprises a C₁₀-C₆₀ linear, saturated or partially unsaturated, aliphatic chain. In some embodiments, a lipid comprises a C₁₀-C₆₀ linear, saturated or partially unsaturated, aliphatic chain, optionally substituted with one or more C₁₋₄ aliphatic group. In some embodiments, the lipid is selected from the group consisting of: lauric acid, myristic acid, palmitic acid, stearic acid, oleic acid, linoleic acid, alpha-linolenic acid, gamma-linolenic acid, docosahexaenoic acid (cis-DHA), turbinaric acid and dilinoleyl.

[1574] In some embodiments, an APOC3 oligonucleotide or a single-stranded RNAi agent is an APOC3 oligonucleotide, whose sequence is or comprises an element that is substantially complementary to a targeted element in a cellular nucleic acid. In some embodiments, a targeted element is or comprises a sequence element that is associated with a muscle disease, disorder or condition. In some embodiments, a muscle disease, disorder or condition is DMD. In some embodiments, a cellular nucleic acid is or comprises a transcript. In some embodiments, a cellular nucleic acid is or comprises a primary transcript. In some embodiments, a cellular nucleic acid is or comprises a genomic nucleic acid. The present disclosure encompasses the recognition that certain lipids and other compounds are useful for delivery of single-stranded RNAi agents to cells and tissues, e.g., in a mammal or human subject. Many technologies for delivering such agents can suffer from an inability to target desired cells or tissues.

[1575] Delivery of single-stranded RNAi agents to tissues outside the liver remains difficult. Juliano reported that, despite advances at the clinical level, effective delivery of oligonucleotides in vivo remains a major challenge, especially at extra-hepatic sites. Juliano 2016 Nucl. Acids Res. Doi: 10.1093/nar/gkw236. Lou also reported that delivery of RNAi agent to organs beyond the liver remains the biggest hurdle to using the technology for a host of diseases. Lou 2014 SciBX 7(48); doi:10.1038/scibx.2014.1394.

[1576] The present disclosure encompasses certain surprising findings, including that certain lipids and other compounds are particularly effective at delivering single-stranded RNAi agents, including oligonucleotides, to particular cells and tissues, including cells and tissues outside the liver, including, as non-limiting examples, muscle cells and tissues.

[1577] In some embodiments, provided compositions alter single-stranded RNA interference system so that an undesired target and/or biological function are suppressed. In some embodiments, in such cases provided composition can also induce cleavage of the transcript after hybridization.

[1578] In some embodiments, provided compositions alter single-stranded RNA interference system so a desired target and/or biological function is enhanced. In some embodiments, provided compositions, by incorporating chemical modifications, stereochemistry and/or combinations thereof, effectively suppress or prevent cleavage of a target transcript after contact.

[1579] In some embodiments, each oligonucleotide of a plurality comprises one or more modified sugar moieties and modified internucleotidic linkages. In some embodiments, each oligonucleotide of a plurality comprises two or more modified sugar moieties. In some embodiments, each oligonucleotide of a plurality comprises three or more modified sugar moieties. In some embodiments, each oligonucleotide of a plurality comprises four or more modified sugar moieties. In some embodiments, each oligonucleotide of a plurality comprises five or more modified sugar moieties. In some embodiments, each oligonucleotide of a plurality comprises ten or more modified sugar moieties. In some embodiments, each oligonucleotide of a plurality comprises about 15 or more modified sugar moieties. In some embodiments, each oligonucleotide of a plurality comprises about 20 or more modified sugar moieties. In some embodiments, each oligonucleotide of a plurality comprises about 25 or more modified sugar moieties.

### EXEMPLIFICATION

[1580] The foregoing has been a description of certain non-limiting embodiments of the disclosure. Accordingly, it is to be understood that the embodiments of the disclosure herein described are merely illustrative of the application of the principles of the disclosure. Reference herein to details of the illustrated embodiments is not intended to limit the scope of the claims.

[1581] Certain methods for preparing oligonucleotides and oligonucleotide compositions are widely known in the art and can be utilized in accordance with the present disclosure, including but not limited to those described in WO/2010/064146, WO/2011/005761, WO/2013/012758, WO/2014/010250, US2013/0178612, WO/2014/012081, WO/2015/107425, WO/2017/015555, and WO/2017/062862, the methods and reagents of each of which are incorporated herein by reference.

[1582] Applicant describes herein certain examples of provided oligonucleotide and compositions thereof, and methods for preparing, assessing, assaying, and using, etc., certain provided oligonucleotides and compositions thereof.

### Example 1. Example Protocols for Assessing Oligonucleotides

[1583] As a personal having ordinary skill in the art appreciates, many technologies (e.g., reagents, methods, etc.) can be utilized to assess activities and properties of provided oligonucleotides. Below is one example protocol describing reverse transfection of oligonucleotides (using certain oligonucleotides that can function as ssRNAi as examples) in 96 Well Plate format using Lipofectamine® 2000 (Invitrogen) for assessing oligonucleotide activities in cells:
[1584] 1. Prepare each ssRNAi, preferably in multiple (e.g., 8) doses, e.g., in a final volume of 25 uL. Example initial concentration could be 150 nM; serial dilution, for example in Opti-MEM® medium without serum, typically by a factor of 4.
[1585] 2. Lipofectamine® 2000 is desirably mixed gently before use, then diluted 0.25 μl Lipofectamine® 2000 in 25 μl Opti-MEM® medium without serum in a separate vessel. Further gentle mixing can be followed by incubation, e.g., for 5 minutes at room temperature.
[1586] 3. After incubation, diluted Lipofectamine® 2000 (e.g., 25 uL) can be added to the (diluted) ssRNAi molecules (typically comparable volume, e.g., 25 uL). The combination is desirably mixed gently and may be incubated, e.g., for 15 minutes at room temperature, to allow complex formation to occur.
[1587] 4. Complexes are then contacted with cells, for example by adding 100 μl complete growth medium without antibiotics with 15,000 Hep3B cells to each ssRNAi molecule-Lipofectamine® 2000 complex. This gives a final volume of 150 μl, and final oligo concentrations are 25, 6.25, 1.56, 0.39, 0.097, 0.024, 0.0061, and 0.0015 nM. Mix gently by rocking the plate back and forth.
[1588] 5. Cells are incubated, e.g., at 37° C. in a CO₂ incubator for 48 hours.
[1589] 6. Cells are harvested and mRNA is isolated, e.g., using TurboCapture mRNA kit (Qiagen), as per vendor provided protocol.
[1590] 7. CDNA is prepared, e.g., using Roche CDNA synthesis Kit (Roche), as per vendor provided protocol.
[1591] 8. Target knockdown is quantified, e.g., by Taqman assays using gene-specific Taqman probes multiplexed with HPRT1 probes, in LightCycler® 480 Probes Master mix (Roche), as per vendor provided protocol. Typically, data are normalized, for example relative to a housekeeping gene such as HPRT1 (Hypoxanthine Phosphoribosyltransferase 1).
[1592] 9. If multiple dose strengths/concentrations were utilized, dose-response curves can be prepared for each ssRNAi agent, e.g., using Prism Software. IC₅₀ can be determined if desired.

[1593] Similar protocols can be used for different oligonucleotides targeting other genes and can use different cells.

[1594] Alternatively or additionally, one or more activities and properties of oligonucleotides can be assessed using other technologies (e.g., reagents, kits, methods, etc.) in accordance with the present disclosure. Certain data generated from various types of assays are provided in the Tables, demonstrating, for example, unexpectedly high activities, stability, selectivity, etc., of presently provided technologies.

[1595] Various models are available for assessing provided technologies in subjects. In some embodiments, provided technologies show high activities, stability, and/or selectivity when administered to animals. Those skilled in the art are aware of animal systems that are considered to be relevant to and/or predictive for certain relevant human diseases, disorders and/or conditions that might benefit from oligonucleotide therapy as described herein.

### Example 2. Example IC50 of Certain Provided Oligonucleotides

[1596] IC50 of certain oligonucleotides (which may function as single-stranded RNAi agents to APOC3) measured using a protocol such as that presented in Example 1 are provided in the following Table.

| Oligonucleotide | IC50 (nM) |
|---|---|
| WV-5291 | 0.372 |
| WV-6411 | 0.121 |
| WV-6412 | 0.129 |
| WV-6413 | 0.089 |
| WV-6414 | 0.144 |
| WV-6415 | 0.169 |
| WV-6416 | 0.206 |
| WV-6417 | 0.158 |
| WV-6418 | 0.164 |
| WV-6419 | 0.121 |
| WV-6420 | 0.230 |
| WV-6421 | 0.216 |
| WV-6422 | 0.301 |
| WV-6423 | 0.616 |
| WV-6424 | 0.226 |
| WV-6425 | 0.412 |
| WV-6426 | 0.325 |
| WV-6427 | 0.170 |
| WV-6428 | 0.249 |
| WV-6429 | 0.237 |
| WV-6430 | 0.204 |
| WV-6764 | 0.609 |
| WV-6765 | 0.709 |

### Example 3. Example Compounds for Incorporating Moieties—Synthesis of Tri-Antennary GalNAc (with C12, C5, or Triazine Linkers)

[1597] In some embodiments, the present disclosure provides technologies (e.g., reagents, methods, conjugates, etc.) for incorporating various moieties (e.g., carbohydrate moieties, lipid moieties, targeting moieties, etc.) into provided oligonucleotide. Described herein are certain examples for incorporating carbohydrate moieties. In some embodiments, a carbohydrate moiety may function as a targeting moiety.

### Example 3-1. Synthesis of 1-(((2R,3R,4R,5R,6R)-3-acetamido-4,5-diacetoxy-6-(acetoxymethyl)tetrahydro-2H-pyran-2-yl)oxy)-16,16-bis((3-((3-(5-(((2R,3R,4R,5R,6R)-3-acetamido-4,5-diacetoxy-6-(acetoxymethyl)tetrahydro-2H-pyran-2-yl)oxy)pentanamido)propyl)amino)-3-oxopropoxy)methyl)-5,11,18-trioxo-14-oxa-6,10,17-triazanonacosan-29-oic acid

[chemical structure]

[chemical structure]

[chemical structure]

### Step 1

[1599] To a solution of di-tert-butyl 3,3′-((2-amino-2-((3-(tert-butoxy)-3-oxopropoxy)methyl)propane-1,3-diyl)bis(oxy))dipropanoate (5.0 g, 9.89 mmol) and 12-methoxy-12-oxododecanoic acid (2.416 g, 9.89 mmol) in DMF (45 mL) was added HATU (3.76 g, 9.89 mmol) and DIPEA (2.58 ml, 14.83 mmol). The reaction mixture was stirred at room temperature for 5 hrs. Solvent was concentrated under reduced pressure, and diluted with brine, extracted with EtOAc, dried over anhydrous sodium sulfate, and concentrated to give a residue, which was purified by ISCO (120 g gold silica gel cartridge) eluting with 10% EtOAc in hexane to 40% EtOAc in hexane to give di-tert-butyl 3,3′-((2-((3-(tert-butoxy)-3-oxopropoxy)methyl)-2-(12-methoxy-12-oxododecanamido)propane-1,3-diyl)bis(oxy))dipropanoate (5.13 g, 7.01 mmol, 70.9% yield) as a colorless oil. ¹H NMR (400 MHz, Chloroform-d) δ 6.03 (s, 1H), 3.74-3.61 (m, 15H), 2.45 (t, J=6.3 Hz, 6H), 2.31 (td, J=7.5, 3.9 Hz, 2H), 2.19-2.10 (m, 2H), 1.64-1.59 (m, 4H), 1.46 (s, 27H), 1.32-1.24 (m, 12H); MS (ESI), 732.6 (M+H)+.

### Step 2

[1600] A solution of di-tert-butyl 3,3′-((2-((3-(tert-butoxy)-3-oxopropoxy)methyl)-2-(12-methoxy-12-oxododecanamido)propane-1,3-diyl)bis(oxy))dipropanoate (5.0 g, 6.83 mmol) in formic acid (50 mL) was stirred at room temperature for 48 hrs. Solvent was evaporated under reduced pressure, co-evaporated with toluene (3×) to give a white solid, which was dried under high vacuum for 2 days. LC-MS and H NMR showed the reaction is not complete. The crude product was redissolved in formic acid (50 mL). The reaction mixture was stirred at room temperature for 24 hrs. LC-MS showed the reaction was complete. Solvent was evaporated under reduced pressure, co-evaporated with toluene (3×), dried over high vacuum to give 3,3′-((2-((2-carboxyethoxy)methyl)-2-(12-methoxy-12-oxododecanamido)propane-1,3-diyl)bis(oxy))dipropanoic acid (4.00 g) as a white solid. MS (ESI): 562.4 (M−H)⁻.

### Step 3

[1601] A solution of 3,3′-((2-((2-carboxyethoxy)methyl)-2-(12-methoxy-12-oxododecanamido)propane-1,3-diyl)bis(oxy))dipropanoic acid (3.85 g, 6.83 mmol) and HOBt (3.88 g, 28.7 mmol) in DCM (60 mL) and DMF (15 mL) at 0° C. was added tert-butyl (3-aminopropyl)carbamate (4.76 g, 27.3 mmol), EDAC HCl salt (5.24 g, 27.3 mmol) and DIPEA (8.33 ml, 47.8 mmol). The reaction mixture was stirred at 0° C. for 15 minutes and at room temperature for 20 hrs. LC-MS showed the reaction was not complete. t-Butyl (3-aminopropyl) carbamate (1.59 g, 9.12 mmol) and EDC HCl salt (1.75 g, 9.13 mol) was added into the reaction mixture. The reaction mixture was continually stirred at room temperature for 4 hrs. Solvent was evaporated to give a residue, which was dissolved in EtOAc (300 mL), washed with water (1×), saturated sodium bicarbonate (2×), 10% citric acid (2×) and water, dried over sodium sulfate, and concentrated to give a residue which was purified by ISCO (80 g gold cartridge) eluting with DCM to 30% MeOH in DCM to give methyl 15,15-bis(13,13-dimethyl-5,11-dioxo-2,12-dioxa-6,10-diazatetradecyl)-2,2-dimethyl-4,10,17-trioxo-3,13-dioxa-5,9,16-triazaoctacosan-28-oate (6.61 g, 6.40 mmol, 94% yield over 2 steps) as a white solid. MS (ESI): 1033.5 (M+H)+.

### Step 4

[1602] To a solution of methyl 15,15-bis(13,13-dimethyl-5,11-dioxo-2,12-dioxa-6,10-diazatetradecyl)-2,2-dimethyl-4,10,17-trioxo-3,13-dioxa-5,9,16-triazaoctacosan-28-oate (6.56 g, 6.35 mmol) in THF (75 mL) was added aq. LiOH (0.457 g, 19.06 mmol) in water (25 mL). The mixture was stirred at room temperature for overnight. LC-MS showed the reaction was completed. Solvent was evaporated, acidified using 1 N HCl (45 mL), extracted with DCM (3×), dried over anhydrous sodium sulfate, concentrated to give 15,15-bis(13,13-dimethyl-5,11-dioxo-2,12-dioxa-6,10-diazatetradecyl)-2,2-dimethyl-4,10,17-trioxo-3,13-dioxa-5,9,16-triazaoctacosan-28-oic acid (6.31 g, 6.20 mmol, 98% yield) as a white solid. MS (ESI): 1019.6 (M+H)⁺.

### Step 5

[1603] To a solution of 15,15-bis(13,13-dimethyl-5,11-dioxo-2,12-dioxa-6,10-diazatetradecyl)-2,2-dimethyl-4,10,17-trioxo-3,13-dioxa-5,9,16-triazaoctacosan-28-oic acid (6.31 g, 6.20 mmol) and (bromomethyl)benzene (1.272 g, 7.44 mmol) in DMF (40 mL) was added K₂CO₃ (2.57 g, 18.59 mmol). The mixture was stirred at 40° C. for 4 hrs and at room temperature for overnight. Solvent was evaporated under reduced pressure. The reaction mixture was diluted with EtOAc, washed with water, dried over anhydrous sodium sulfate, concentrated under reduced pressure to give a residue, which was purified by ISCO (80 g cartridge) eluting with DCM to 30% MeOH in DCM to give benzyl 15,15-bis(13,13-dimethyl-5,11-dioxo-2,12-dioxa-6,10-diazatetradecyl)-2,2-dimethyl-4,10,17-trioxo-3,13-dioxa-5,9,16-triazaoctacosan-28-oate (6.41 g, 5.78 mmol, 93% yield) as a colorless oil. ¹H NMR (400 MHz, DMSO-d₆) δ 7.80 (t, J=5.7 Hz, 3H), 7.39-7.30 (m, 5H), 6.95 (s, 1H), 6.74 (t, J=5.8 Hz, 3H), 5.07 (s, 2H), 3.53 (J, J=7.3 Hz, 6H), 3.51 (s, 6H), 3.02 (q, J=6.7 Hz, 6H), 2.94-2.85 (m, 6H), 2.29 (dt, J=26.1, 6.9 Hz, 8H), 2.02 (q, J=9.7, 8.6 Hz, 2H), 1.56-1.39 (m, 10H), 1.35 (s, 27H), 1.20 (brs, 14H); MS (ESI): 1019.6 (M+H)⁺.

### Step 6

[1604] To a solution of benzyl 15,15-bis(13,13-dimethyl-5,11-dioxo-2,12-dioxa-6,10-diazatetradecyl)-2,2-dimethyl-4,10,17-trioxo-3,13-dioxa-5,9,16-triazaoctacosan-28-oate (2.42 g, 2.183 mmol) in DCM (40 mL) was added 2,2,2-trifluoroacetic acid (8 ml, 105 mmol). The reaction mixture was stirred at room temperature for overnight. Solvent was evaporated under reduced pressure, co-evaporated with toluene (2×), triturated with ether, dried under high vacuum for overnight. Directly use TFA salt for next step.

### Step 7

[1605] To a solution of 5-(((2R,3R,4R,5R,6R)-3-acetamido-4,5-diacetoxy-6-(acetoxymethyl)tetrahydro-2H-pyran-2-yl)oxy)pentanoic acid (3.91 g, 8.73 mmol), HBTU (3.48 g, 9.17 mmol) and HOBT (1.239 g, 9.17 mmol) in DCM (25 mL) was added DIPEA (6.08 ml, 34.9 mmol) followed by benzyl 12-((1,19-diamino-10-((3-((3-aminopropyl)amino)-3-oxopropoxy)methyl)-5,15-dioxo-8,12-dioxa-4,16-diazanonadecan-10-yl)amino)-12-oxododecanoate (1.764 g, 2.183 mmol) in DMF (4.0 mL). The mixture was stirred at room temperature for 5 hrs. Solvent was evaporated under reduced pressure to give a residue, which was purified by ISCO (40 g gold column) eluting with 5% MeOH in DCM for 5 column value to remove HOBt followed by 5% to 30% MeOH in DCM to give 1-(((2R,3R,4R,5R,6R)-3-acetamido-4,5-diacetoxy-6-(acetoxymethyl)tetrahydro-2H-pyran-2-yl)oxy)-16,16-bis((3-((3-(5-(((2R,3R,4R,5R,6R)-3-acetamido-4,5-diacetoxy-6-(acetoxymethyl)tetrahydro-2H-pyran-2-yl)oxy)pentanamido)propyl)amino)-3-oxopropoxy)methyl)-5,11,18-trioxo-14-oxa-6,10,17-triazanonacosan-29-oic benzyl ester (3.98 g, 87% yield) as a white solid. ¹H NMR (400 MHz, DMSO-d₆) δ 7.82-7.74 (m, 6H), 7.69 (t, J=5.6 Hz, 3H), 7.33-7.27 (m, 5H), 6.94 (s, 1H), 5.16 (d, J=3.4 Hz, 3H), 5.03 (s, 2H), 4.92 (dd, J=11.2, 3.4 Hz, 3H), 4.43 (d, J=8.4 Hz, 3H), 4.02-3.95 (m, 9H), 3.82 (dt, J=11.2, 8.8 Hz, 3H), 3.65 (dt, J=10.5, 5.6 Hz, 3H), 3.51-3.44 (m, 12H), 3.36 (dt, J=9.6, 6.0 Hz, 3H), 3.01-2.95 (m, 12H), 2.29 (t, J=7.4 Hz, 2H), 2.23 (t, J=6.3 Hz, 6H), 2.05 (s, 9H), 1.99 (t, J=7.0 Hz, 8H), 1.94 (s, 9H), 1.84 (s, 9H), 1.72 (s, 9H), 1.50-1.14 (m, 34H); MS (ESI): 1049.0 (M/2+H)⁺.

### Step 8

[1606] To a round bottom flask flushed with Ar was added 10% Pd/C (165 mg, 0.835 mmol) and EtOAc (15 mL). A solution of Benzyl protected tris-GalNAc (1.75 g, 0.835 mmol) in methanol (15 mL) was added followed by triethylsilane (2.67 ml, 16.70 mmol) dropwise. The mixture was stirred at room temperature for 3 hrs. LC-MS showed the reaction was complete, diluted with EtOAc, and filtered through celite, washed with 20% MeOH in EtOAc, concentrated under reduced pressure to give 1-(((2R,3R,4R,5R,6R)-3-acetamido-4,5-diacetoxy-6-(acetoxymethyl)tetrahydro-2H-pyran-2-yl)oxy)-16,16-bis((3-((3-(5-(((2R,3R,4R,5R,6R)-3-acetamido-4,5-diacetoxy-6-(acetoxymethyl)tetrahydro-2H-pyran-2-yl)oxy)pentanamido)propyl)amino)-3-oxopropoxy)methyl)-5,11,18-trioxo-14-oxa-6,10,17-triazanonacosan-29-oic acid (1.67 g, 0.832 mmol, 100% yield) as a white solid. ¹H NMR (400 MHz, DMSO-d₆) δ 11.95 (s, 1H), 7.83-7.74 (m, 6H), 7.69 (t, J=5.7 Hz, 3H), 6.93 (s, 1H), 5.16 (d, J=3.4 Hz, 3H), 4.92 (dd, J=11.2, 3.4 Hz, 3H), 4.43 (d, J=8.4 Hz, 3H), 4.01-3.94 (m, 9H), 3.82 (dt, J=11.3, 8.8 Hz, 3H), 3.66 (dt, J=10.7, 5.6 Hz, 3H), 3.54-3.43 (m, 12H), 3.41-3.33 (m, 3H), 3.03-2.94 (m, 12H), 2.24 (t, J=7.4 Hz, 10H), 2.14 (t, J=7.4 Hz, 2H), 2.06 (s, 9H), 2.00 (t, J=7.2 Hz, 8H), 1.95 (s, 9H), 1.84 (s, 9H), 1.73 (s, 9H), 1.51-1.14 (m, 34H). MS (ESI): 1003.8 (M/2+H)⁺.

### Example 3-2. Synthesis of 22-(((2R,3R,4R,5R,6R)-3-acetamido-4,5-diacetoxy-6-(acetoxymethyl)tetrahydro-2H-pyran-2-yl)oxy)-7,7-bis((3-((3-(5-(((2R,3R,4R,5R,6R)-3-acetamido-4,5-diacetoxy-6-(acetoxymethyl)tetrahydro-2H-pyran-2-yl)oxy)pentanamido)propyl)amino)-3-oxopropoxy)methyl)-5,12,18-trioxo-9-oxa-6,13,17-triazadocosanoic acid

[chemical structure]

[chemical structure]

[chemical structure]

### Step 1

[1608] A solution of di-tert-butyl 3,3′-((2-amino-2-((3-(tert-butoxy)-3-oxopropoxy)methyl)propane-1,3-diyl)bis(oxy))dipropanoate (4.0 g, 7.91 mmol) and dihydro-2H-pyran-2,6(3H)-dione (0.903 g, 7.91 mmol) in THF (40 mL) was stirred at 50° C. for 3 hrs and at rt for 3 hrs. LC-MS showed desired product. Solvent was evaporated to give the acid, which was directly used for next step without purification.

### Step 2

[1609] To a solution of 5-((9-((3-(tert-butoxy)-3-oxopropoxy)methyl)-2,2,16,16-tetramethyl-4,14-dioxo-3,7,11,15-tetraoxaheptadecan-9-yl)amino)-5-oxopentanoic acid (4.90 g, 7.91 mmol) and (bromomethyl)benzene (1.623 g, 9.49 mmol) in DMF was added anhydrous K2CO₃ (3.27 g, 23.73 mmol). The mixture was stirred at 40° C. for 4 hrs and at room temperature for overnight. Solvent was evaporated under reduced pressure. The reaction mixture was diluted with EtOAc, washed with water, dried over anhydrous sodium sulfate, concentrated under reduced pressure to give a residue, which was purified by ISCO eluting with 10% EtOAc in hexane to 50% EtOAc in hexane to give di-tert-butyl 3,3′-((2-(5-(benzyloxy)-5-oxopentanamido)-2-((3-(tert-butoxy)-3-oxopropoxy)methyl)propane-1,3-diyl)bis(oxy))dipropanoate (5.43 g, 7.65 mmol, 97% yield) as a colorless oil. ¹H NMR (400 MHz, Chloroform-d) δ 7.36-7.28 (m, 5H), 6.10 (s, 1H), 5.12 (s, 2H), 3.70 (s, 6H), 3.64 (t, J=8.0 Hz, 6H), 2.50-2.38 (m, 8H), 2.22 (t, J=7.3 Hz, 2H), 1.95 (p, J=7.4 Hz, 2H), 1.45 (s, 27H); MS, 710.5 (M+H)⁺.

### Step 3

[1610] A solution of di-tert-butyl 3,3′-((2-(5-(benzyloxy)-5-oxopentanamido)-2-((3-(tert-butoxy)-3-oxopropoxy)methyl)propane-1,3-diyl)bis(oxy))dipropanoate (5.43 g, 7.65 mmol) in formic acid (50 mL) was stirred at room temperature for 48 hrs. LC-MS showed the reaction was not complete. Solvent was evaporated under reduced pressure. The crude product was re-dissolved in formic acid (50 mL) and was stirred at room temperature for 6 hrs. LC-MS showed the reaction was complete. Solvent was evaporated under reduced pressure, co-evaporated with toluene (3×) under reduced pressure, and dried under vacuum to give 3,3′-((2-(5-(benzyloxy)-5-oxopentanamido)-2-((2-carboxyethoxy)methyl)propane-1,3-diyl)bis(oxy))dipropanoic acid (4.22 g, 7.79 mmol, 102% yield) as a white solid. ¹H NMR (500 MHz, DMSO-d₆) δ 12.11 (s, 3H), 7.41-7.27 (m, 5H), 6.97 (s, 1H), 5.07 (s, 2H), 3.55 (t, J=6.4 Hz, 6H), 3.53 (s, 6H), 2.40 (t, J=6.3 Hz, 6H), 2.37-2.26 (m, 2H), 2.08 (t, J=7.3 Hz, 2H), 1.70 (p, J=7.4 Hz, 2H); MS, 542.3 (M+H)⁺.

### Step 4

[1611] A solution of 3,3′-((2-(5-(benzyloxy)-5-oxopentanamido)-2-((2-carboxyethoxy)methyl)propane-1,3-diyl)bis(oxy))dipropanoic acid (4.10 g, 7.57 mmol) and HOBt (4.60 g, 34.1 mmol) in DCM (60 mL) and DMF (15 mL) at 0° C. was added tert-butyl (3-aminopropyl)carbamate (5.94 g, 34.1 mmol), EDAC HCl salt (6.53 g, 34.1 mmol) and DIPEA (10.55 ml, 60.6 mmol). The reaction mixture was stirred at 0° C. for 15 minutes and at room temperature for 20 hrs. LC-MS showed the reaction was not complete. EDAC HCl salt (2.0 g) and tert-butyl (3-aminopropyl)carbamate (1.0 g) was added into the reaction mixture. The reaction mixture was stirred at room temperature for 4 hrs. Solvent was evaporated to give a residue, which was dissolved in EtOAc (300 mL), washed with water (1×), saturated sodium bicarbonate (2×), 10% citric acid (2×) and water, dried over sodium sulfate, and concentrated to give a residue which was purified by ISCO (80 g gold cartridge) eluting with DCM to 30% MeOH in DCM to give benzyl 15,15-bis(13,13-dimethyl-5,11-dioxo-2,12-dioxa-6,10-diazatetradecyl)-2,2-dimethyl-4,10,17-trioxo-3,13-dioxa-5,9,16-triazahenicosan-21-oate (6.99 g, 6.92 mmol, 91% yield) as a white solid. ¹H NMR (500 MHz, Chloroform-d) δ 7.38-7.33 (m, 5H), 6.89 (brs, 3H), 6.44 (s, 1H), 5.23 (brs, 3H), 5.12 (s, 2H), 3.71-3.62 (m, 12H), 3.29 (q, J=6.2 Hz, 6H), 3.14 (q, J=6.5 Hz, 6H), 2.43 (dt, J=27.0, 6.7 Hz, 8H), 2.24 (t, J=7.2 Hz, 2H), 1.96 (p, J=7.5 Hz, 2H), 1.64-1.59 (m, 6H), 1.43 (d, J=5.8 Hz, 27H); MS (ESI): 1011.5 (M+H)⁺.

### Step 5

[1612] To a solution of benzyl 15,15-bis(13,13-dimethyl-5,11-dioxo-2,12-dioxa-6,10-diazatetradecyl)-2,2-dimethyl-4,10,17-trioxo-3,13-dioxa-5,9,16-triazahenicosan-21-oate (0.95 g, 0.940 mmol) in DCM (5 mL) was added TFA (5 mL). The reaction mixture was stirred at room temperature for 4 hrs. LC-MS showed the reaction was completed. Solvent was evaporated under reduced pressure to give benzyl 5-((1,19-diamino-10-((3-aminopropyl)amino)-3-oxopropoxy)methyl)-5,15-dioxo-8,12-dioxa-4,16-diazanonadecan-10-yl)amino)-5-oxopentanoate as a colorless oil. Directly use for next step without purification.

### Step 6

[1613] To a solution of 5-(((2R,3R,4R,5R,6R)-3-acetamido-4,5-diacetoxy-6-(acetoxymethyl)tetrahydro-2H-pyran-2-yl)oxy)pentanoic acid (1.684 g, 3.76 mmol), HBTU (1.246 g, 3.29 mmol) and HOBT (0.052 g, 0.376 mmol) in DCM (40 mL) followed by 10-(5-(benzyloxy)-5-oxopentanamido)-N1,N19-dichloro-10-((3-((3-(chloroammonio)propyl)amino)-3-oxopropoxy)methyl)-5,15-dioxo-8,12-dioxa-4,16-diazanonadecane-1,19-diaminium (0.767 g, 0.940 mmol) in DMF (2.0 mL). The mixture was stirred at room temperature for 5 hrs. Solvent was evaporated under reduced pressure to give a residue, which was purified by ISCO (40 g gold column) eluting with DCM to 30% MeOH in DCM to give 22-(((2R,3R,4R,5R,6R)-3-acetamido-4,5-diacetoxy-6-(acetoxymethyl)tetrahydro-2H-pyran-2-yl)oxy)-7,7-bis((3-((3-(5-(((2R,3R,4R,5R,6R)-3-acetamido-4,5-diacetoxy-6-(acetoxymethyl)tetrahydro-2H-pyran-2-yl)oxy)pentanamido)propyl)amino)-3-oxopropoxy)methyl)-5,12,18-trioxo-9-oxa-6,13,17-triazadocosanoic benzyl ester (1.11 g, 0.556 mmol, 59% yield) as a white solid. MS (ESI): 1000.0 (M/2+H)⁺.

### Step 7

[1614] To a round bottom flask flushed with Ar was added 10% Pd/C (100 mg, 0.500 mmol) and EtOAc (10 mL). A solution of 22-(((2R,3R,4R,5R,6R)-3-acetamido-4,5-diacetoxy-6-(acetoxymethyl)tetrahydro-2H-pyran-2-yl)oxy)-7,7-bis((3-((3-(5-(((2R,3R,4R,5R,6R)-3-acetamido-4,5-diacetoxy-6-(acetoxymethyl)tetrahydro-2H-pyran-2-yl)oxy)pentanamido)propyl)amino)-3-oxopropoxy)methyl)-5,12,18-trioxo-9-oxa-6,13,17-triazadocosanoic benzyl ester (1.00 g, 0.500 mmol) in methanol (10 mL) was added followed by triethylsilane (1.599 ml, 10.01 mmol) dropwise. The mixture was stirred at room temperature for 3 hrs. LC-MS showed the reaction was complete, diluted with EtOAc, and filtered through celite, washed with 20% MeOH in EtOAc, concentrated under reduced pressure to give 22-(((2R,3R,4R,5R,6R)-3-acetamido-4,5-diacetoxy-6-(acetoxymethyl)tetrahydro-2H-pyran-2-yl)oxy)-7,7-bis((3-((3-(5-(((2R,3R,4R,5R,6R)-3-acetamido-4,5-diacetoxy-6-(acetoxymethyl)tetrahydro-2H-pyran-2-yl)oxy)pentanamido)propyl)amino)-3-oxopropoxy)methyl)-5,12,18-trioxo-9-oxa-6,13,17-triazadocosan-1-oic acid (0.9433 g, 0.494 mmol, 99% yield) as a white solid. ¹H NMR (500 MHz, DMSO-d₆) δ 7.85-7.78 (m, 6H), 7.72 (t, J=5.7 Hz, 3H), 7.03 (s, 1H), 5.20 (d, J=3.4 Hz, 3H), 4.95 (dd, J=11.2, 3.5 Hz, 3H), 4.47 (d, J=8.3 Hz, 3H), 4.05-3.99 (m, 9H), 3.85 (dt, J=11.0, 8.8 Hz, 3H), 3.69 (dt, J=10.6, 5.8 Hz, 3H), 3.52 (dd, J=12.3, 5.6 Hz, 12H), 3.39 (dt, J=11.2, 6.3 Hz, 3H), 3.02 (p, J=6.3 Hz, 12H), 2.26 (t, J=6.4 Hz, 6H), 2.17 (t, J=7.5 Hz, 2H), 2.11-2.07 (m, 11H), 2.03 (t, J=7.1 Hz, 6H), 1.98 (s, 9H), 1.87 (s, 9H), 1.76 (s, 9H), 1.53-1.18 (m, 20H); MS (ESI): 1909.4 (M+H)⁺.

### Example 3-3. Synthesis of 5-(4-(4-((3-((3-(5-(((2R,3R,4R,5R,6R)-3-acetamido-4,5-diacetoxy-6-(acetoxymethyl)tetrahydro-2H-pyran-2-yl)oxy)pentanamido)propyl)amino)-3-oxopropyl)amino)-6-(bis(3-((3-(5-(((2R,3R,4R,5R,6R)-3-acetamido-4,5-diacetoxy-6-(acetoxymethyl)tetrahydro-2H-pyran-2-yl)oxy)pentanamido)propyl)amino)-3-oxopropyl)amino)-1,3,5-triazin-2-yl)piperazin-1-yl)-5-oxopentanoic acid

[chemical structure]

[chemical structure]

[1616] Steps 1 to 3:

[1617] To a solid reagent 2,4,6-trichloro-1,3,5-triazine (0.700 g, 3.80 mmol) in DCM (25 mL) at 0° C. was added tert-butyl 3-aminopropanoate HCl salt (0.690 g, 3.80 mmol) and TEA (0.635 ml, 4.56 mmol). The reaction mixture was stirred at 0° C. for 1 hrs. LC-MS showed the desired product. Solvent was evaporated under reduced pressure to give a residue, which was directly used for next step. To a solution of tert-butyl 3-((4,6-dichloro-1,3,5-triazin-2-yl)amino)propanoate (1.114 g, 3.80 mmol) in DMF (15 mL) was added di-tert-butyl 3,3′-azanediyldipropanoate (1.039 g, 3.80 mmol) and DIPEA (1.324 ml, 7.60 mmol). The reaction mixture was stirred at room temperature for 2 hrs. LC-MS showed desired product. To the above reaction mixture was added benzyl 5-oxo-5-(piperazin-1-yl)pentanoate (1.103 g, 3.80 mmol) and K2CO₃ (1.576 g, 11.40 mmol). The reaction mixture was stirred at room temperature for overnight. Diluted with EtOAc, filtered and concentrated under reduced pressure to give a residue, which was purified by ISCO (40 g gold) eluting with 10% EtOAc in hexane to 50% EtOAc in hexane to give di-tert-butyl 3,3′-((4-(4-(5-(benzyloxy)-5-oxopentanoyl)piperazin-1-yl)-6-((3-(tert-butoxy)-3-oxopropyl)amino)-1,3,5-triazin-2-yl)azanediyl)dipropionate (0.90 g, 30%) as a colorless oil. ¹H NMR (500 MHz, Chloroform-d) δ 7.43-7.31 (m, 5H), 5.12 (s, 2H), 3.81-3.66 (m, 8H), 3.60 (dd, J=7.6, 4.8 Hz, 4H), 3.40 (t, J=5.1 Hz, 2H), 2.57-2.44 (m, 8H), 2.39 (t, J=7.4 Hz, 2H), 2.06-1.95 (m, 2H), 1.45 (s, 9H), 1.43 (s, 18H); MS (ESI): 784.7 (M+H)⁺.

### Step 4

[1618] A solution of di-tert-butyl 3,3′-((4-(4-(5-(benzyloxy)-5-oxopentanoyl)piperazin-1-yl)-6-43-(tert-butoxy)-3-oxopropyl)amino)-1,3,5-triazin-2-yl)azanediyl)dipropanoate (0.90 g, 1.148 mmol) in formic acid (20 mL) was stirred at room temperature for overnight. LC-MS showed the reaction was not completed and solvent was evaporated. Formic acid (20 mL) was added to the reaction mixture and the reaction mixture was stirred at room temperature for overnight. LC-MS showed the reaction was complete. Solvent was concentrated, co-evaporated with toluene (2×) and dried under vacuum for overnight to give 3,3′-((4-(4-(5-(benzyloxy)-5-oxopentanoyl)piperazin-1-yl)-6-((2-carboxyethyl)amino)-1,3,5-triazin-2-yl)azanediyl)dipropanoic acid (0.75 g, 1.218 mmol, 106% yield) as a white solid. MS (ESI), 616.5 (M+H)⁺.

### Step 5: A solution of 3,3′-((4-(4-(5-(benzyloxy)-5-oxopentanoyl)piperazin-1-yl)-6-((2-carboxyethyl)amino)-1,3,5-triazin-2-yl)azanediyl)dipropanoic acid (0.707 g, 1.148 mmol) and HOBt (0.651 g, 4.82 mmol) in DCM (60 mL) and DMF (15 mL) at 0° C. was added tert-butyl (3-aminopropyl)carbamate (0.840 g, 4.82 mmol), EDAC HCl salt (0.924 g, 4.82 mmol) and DIPEA (1.400 ml, 8.04 mmol). The reaction mixture was stirred at 0° C. for 15 minutes and at room temperature for 20 hrs. LC-MS showed the reaction was not complete. t-Butyl (3-aminopropyl) carbamate (0.28 g) and EDC HCl salt (0.46 g) was added into the reaction mixture. The reaction mixture was continually stirred at room temperature for 4 hrs. Solvent was evaporated to give a residue, which was dissolved in EtOAc (300 mL), washed with water (1×), saturated sodium bicarbonate (2×), 10% citric acid (2×) and water, dried over sodium sulfate, and concentrated to give a residue which was purified by ISCO (80 g gold cartridge) eluting with DCM to 30% MeOH in DCM to give benzyl 5-(4-(4-(bis(3-((3-((tert-butoxycarbonyl)amino)propyl)amino)-3-oxopropyl)amino)-6-((3-((3-((tertbutoxycarbonyl)amino)propyl)amino)-3-oxopropyl)amino)-1,3,5-triazin-2-yl)piperazin-1-yl)-5-oxopentanoate (1.24 g, 1.144 mmol, 100% yield) as a white solid. MS (ESI): 1084.8 (M+H)⁺

### Step 6

[1619] A solution of benzyl 5-(4-(4-(bis(3-((3-((tert-butoxycarbonyl)amino)propyl)amino)-3-oxopropyl)amino)-6-((3-((3-((tertbutoxycarbonyl)amino)propyl)amino)-3-oxopropyl)amino)-1,3,5-triazin-2-yl)piperazin-1-yl)-5-oxopentanoate (328.3 mg, 0.303 mmol) in DCM (5.0 mL) was added TFA (3.0 mL). The reaction mixture was stirred at room temperature for 3 hrs. Solvent was evaporated under reduced pressure, use directly for next step without purification. MS (ESI): 784.6 (M+H)⁺.

### Step 7

[1620] To a solution of 5-(((2R,3R,4R,5R,6R)-3-acetamido-4,5-diacetoxy-6-(acetoxymethyl)tetrahydro-2H-pyran-2-yl)oxy)pentanoic acid (0.570 g, 1.273 mmol) in DCM (6 mL) was added DIPEA (0.40 mL, 2.296 mmol) and perfluorophenyl 2,2,2-trifluoroacetate (0.535 g, 1.910 mmol). The reaction mixture was stirred at room temperature for 2 hrs. Solvent was evaporated under reduced pressure to give a residue, directly use for next step. MS (ESI): 614.3 (M+H)⁺. A solution of benzyl 5-(4-(4-((3-((3-aminopropyl)amino)-3-oxopropyl)amino)-6-(bis(3-((3-aminopropyl)amino)-3-oxopropyl)amino)-1,3,5-triazin-2-yl)piperazin-1-yl)-5-oxopentanoate (0.238 g, 0.303 mmol) in DCM (15 mL) and DMF (3 mL) was added DIPEA (0.633 ml, 3.64 mmol), and a solution of (2R,3R,4R,5R,6R)-5-acetamido-2-(acetoxymethyl)-6-45-oxo-5-(perfluorophenoxy)pentyl)oxy)tetrahydro-2H-pyran-3,4-diyl diacetate (0.781 g, 1.273 mmol) in DCM (6 mL). The reaction mixture was stirred at room temperature for 4 hrs. Solvent was evaporated under reduced pressure to give a residue, which was purified by ISCO (40 g gold) eluting with DCM to 40% MeOH in DCM to give 5-(4-(4-((3-((3-(5-(((2R,3R,4R,5R,6R)-3-acetamido-4,5-diacetoxy-6-(acetoxymethyl)tetrahydro-2H-pyran-2-yl)oxy)pentanamido) propyl)amino)-3-oxopropyl)amino)-6-(bis(3-((3-(5-(((2R,3R,4R,5R,6R)-3-acetamido-4,5-diacetoxy-6-(acetoxymethyl)tetrahydro-2H-pyran-2-yl)oxy)pentanamido)propyl)amino)-3-oxopropyl)amino)-1,3,5-triazin-2-yl)piperazin-1-yl)-5-oxopentanoic benzyl ester (0.47 g, 0.227 mmol, 74.9% yield) as a white solid. ¹H NMR (500 MHz, DMSO-d₆) δ 7.82-7.78 (m, 6H), 7.70 (t, J=5.7 Hz, 3H), 7.35-7.28 (m, 5H), 6.63 (brs, 1H), 5.20 (d, J=3.3 Hz, 3H), 5.08 (s, 2H), 4.95 (dd, J=11.2, 3.4 Hz, 3H), 4.47 (d, J=8.4 Hz, 3H), 4.05-3.96 (m, 9H), 3.85 (dt, J=11.1, 8.8 Hz, 3H), 3.72-3.53 (m, 12H), 3.43-3.36 (m, 6H), 3.05-2.97 (m, 12H), 2.41-2.27 (m, 10H), 2.08 (s, 9H), 2.03 (d, J=7.0 Hz, 6H), 1.98 (s, 9H), 1.87 (s, 9H), 1.75 (s, 9H), 1.47 (s, 9H), 1.53-1.19 (m, 13H); MS (ESI): 1037.0 (M+H)/2⁺.

### Step 8

[1621] To a solution of 5-(4-(4-((3-((3-(5-(((2R,3R,4R,5R,6R)-3-acetamido-4,5-diacetoxy-6-(acetoxymethyl)tetrahydro-2H-pyran-2-yl)oxy)pentanamido)propyl)amino)-3-oxopropyl)amino)-6-(bis(3-((3-(5-(((2R,3R,4R,5R,6R)-3-acetamido-4,5-diacetoxy-6-(acetoxymethyl)tetrahydro-2H-pyran-2-yl)oxy)pentanamido)propyl)amino)-3-oxopropyl)amino)-1,3,5-triazin-2-yl)piperazin-1-yl)-5-oxopentanoic benzyl ester (0.39 g, 0.188 mmol) in EtOAc (10 mL) was added 10% Pd—C(50 mg) followed by 10 mL MeOH under Ar. triethylsilane (0.601 ml, 3.76 mmol) was added to the reaction mixture slowly. The reaction mixture was stirred at room temperature for 2 hrs. filtered through celite, washed with 50% MeOH in EtOAc, solvents were evaporated under reduced pressure to give 5-(4-(4-((3-((3-(5-(((2R,3R,4R,5R,6R)-3-acetamido-4,5-diacetoxy-6-(acetoxymethyl)tetrahydro-2H-pyran-2-yl)oxy)pentanamido)propyl)amino)-3-oxopropyl)amino)-6-(bis(3-4345-(((2R,3R,4R,5R,6R)-3-acetamido-4,5-diacetoxy-6-(acetoxymethyl)tetrahydro-2H-pyran-2-yl)oxy)pentanamido)propyl)amino)-3-oxopropyl)amino)-1,3,5-triazin-2-yl)piperazin-1-yl)-5-oxopentanoic acid (0.373 g, 100% yield) a white solid. ¹H NMR (500 MHz, DMSO-d₆) δ 7.82-7.78 (m, 6H), 7.71 (t, J=5.7 Hz, 3H), 6.64 (s, 1H), 5.20 (d, J=3.3 Hz, 3H), 4.95 (dd, J=11.2, 3.4 Hz, 3H), 4.47 (d, J=8.5 Hz, 3H), 4.06-3.96 (m, 9H), 3.85 (dt, J=11.1, 8.8 Hz, 3H), 3.73-3.56 (m, 11H), 3.45-3.35 (m, 5H), 3.09-2.98 (m, 13H), 2.37-2.28 (m, 10H), 2.25 (t, J=7.3 Hz, 2H), 2.09 (s, 9H), 2.03 (t, J=7.0 Hz, 6H), 1.98 (s, 9H), 1.88 (s, 9H), 1.76 (s, 9H), 1.74-1.67 (m, 2H), 1.55-1.40 (m, 15H); MS (ESI): 1983.4 (M+H)⁺.

### Example 4A. Example Compounds for Incorporating Moieties

[1622] Synthesis of 18,18-bis(17-((1S,2R,3R,4R,5S)-4-acetamido-2,3-dihydroxy-6,8-dioxabicyclo[3.2.1]octan-1-yl)-5,11-dioxo-2,16-dioxa-6,10-diazaheptadecyl)-1-((1S,2R,3R,4R,5S)-4-acetamido-2,3-dihydroxy-6,8-dioxabicyclo[3.2.1]octan-1-yl)-7,13,20-trioxo-2,16-dioxa-8,12,19-triazatetracosan-24-oic acid.

[chemical structure]

### Step 1

[1623] To a solution of tert-butyl 5-bromopentanoate (4.0 g, 16.87 mmol) in acetone (80 mL) was added NaI (7.59 g, 50.6 mmol). The reaction mixture was stirred at 57° C. for 2 hrs, filtered, and washed with EtOAc. Solvent was evaporated under reduced pressure to give a residue, which was dissolved in EtOAc, washed with water, brine, dried over Na₂SO₄, concentrated to give a residue, which was purified by ISCO (40 g column) eluting with 20% EtOAc in hexane to 50% EtOAc in hexane to give tert-butyl 5-iodopentanoate (4.54 g, 15.98 mmol, 95% yield) as a yellow oil. ¹H NMR (500 MHz, Chloroform-d) δ 3.19 (t, J=6.9 Hz, 2H), 2.24 (t, J=7.3 Hz, 2H), 1.86 (p, J=7.1 Hz, 2H), 1.70 (p, J=7.4 Hz, 2H), 1.45 (s, 9H).

### Step 2

[1624] To a solution of N-((1S,2R,3R,4R,5S)-2,3-dihydroxy-1-(hydroxymethyl)-6,8-dioxabicyclo[3.2.1]octan-4-yl)acetamide (600 mg, 2.57 mmol) in DMF (15 mL) was added 2,2-dimethoxypropane (2087 μl, 17.03 mmol) followed by (+/−)-camphor-10-sulphonic acid (264 mg, 1.135 mmol). The reaction mixture was stirred at 70° C. for 24 hrs. The reaction mixture was cooled down to room temperature, and then methanol (2.5 mL) was added. The reaction mixture was stirred at room temperature for 30 minutes and neutralized with TEA (0.10 mL). The solvent was evaporated and the residue was coevaporated with toluene. The residue was purified by ISCO (24 g gold) eluting with EtOAc to 10% MeOH in EtOAc to give N-((3aR,4S,7S,8R,8aR)-4-(hydroxymethyl)-2,2-dimethylhexahydro-4,7-epoxy[1,3]dioxolo[4,5-d]oxepin-8-yl)acetamide (666 mg, 2.437 mmol, 95% yield). ¹H NMR (500 MHz, DMSO-d₆) δ 8.09 (d, J=8.1 Hz, 1H), 5.15-5.05 (m, 2H), 4.26 (d, J=5.8 Hz, 1H), 4.09 (dd, J=7.3, 5.8 Hz, 1H), 3.80-3.60 (m, 5H), 1.83 (s, 3H), 1.37 (s, 3H), 1.26 (s, 3H); MS, 274.3 (M+H)⁺.

### Step 3

[1625] To a solution of tert-butyl 5-iodopentanoate (1310 mg, 4.61 mmol) and N-((3aR,4S,7S,8R,8aR)-4-(hydroxymethyl)-2,2-dimethylhexahydro-4,7-epoxy[1,3]dioxolo[4,5-d]oxepin-8-yl)acetamide 7 (420 mg, 1.537 mmol) in DCM (10.5 mL) was added tetrabutylammonium hydrogensulfate (783 mg, 2.305 mmol) followed by 12.5 M sodium hydroxide solution (7 mL). The reaction mixture was stirred at room temperature for 24 hrs. The reaction mixture was diluted with DCM and water, extracted with DCM (2×). The organic layer was washed with 1 N HCl solution, and dried over sodium sulfate. Solvent was concentrated under reduce pressure to give a residue. The resulting crude material was added ethyl acetate (30 mL) and sonicated for 5 minutes. The result precipitate was filtered, washed with ethyl acetate (10 mL×2). LC-MS showed the filter does not contain desired product and was tetrabutylammonium salt. The filtrate was concentrated under reduced pressure to give a residue, which was purified by ISCO (40 g silica gel gold cartridge) eluting with 50% EtOAc in hexane to EtOAc to give tert-butyl 5-(((3aR,4S,7S,8R,8aR)-8-acetamido-2,2-dimethylhexahydro-4,7-epoxy[1,3]dioxolo[4,5-d]oxepin-4-yl)methoxy)pentanoate (0.470 g, 1.094 mmol, 71.2% yield) as a yellowish oil. ¹H NMR (500 MHz, Chloroform-d) δ 5.56 (d, J=9.1 Hz, 1H), 4.21 (d, J=5.9 Hz, 1H), 4.12 (dtd, J=7.7, 3.8, 1.7 Hz, 1H), 3.99 (t, J=6.3 Hz, 1H), 3.90 (d, J=9.5 Hz, 1H), 3.77 (d, J=2.0 Hz, 2H), 3.67 (d, J=9.5 Hz, 1H), 3.52 (ddt, J=30.5, 9.2, 5.8 Hz, 2H), 2.23 (t, J=7.1 Hz, 2H), 2.03 (d, J=14.5 Hz, 3H), 1.65-1.55 (m, 7H), 1.44 (s, 9H), 1.35 (s, 3H); MS, 452.4 (M+Na)⁺.

### Step 4

[1626] To a solution of benzyl 15,15-bis(13,13-dimethyl-5,11-dioxo-2,12-dioxa-6,10-diazatetradecyl)-2,2-dimethyl-4,10,17-trioxo-3,13-dioxa-5,9,16-triazahenicosan-21-oate (0.168 g, 0.166 mmol) in DCM (3 mL) was added TFA (3 mL). The reaction mixture was stirred at room temperature for 3 hrs. LC-MS showed the reaction was completed. Solvent was evaporated under reduced pressure to give benzyl 5-((1,19-diamino-10-((3-aminopropyl)amino)-3-oxopropoxy)methyl)-5,15-dioxo-8,12-dioxa-4,16-diazanonadecan-10-yl)amino)-5-oxopentanoate as a colorless oil. MS, 710.5 (M+H)+. Directly use for next step without purification.

### Step 5

[1627] To a solution of tert-butyl 5-(((3aR,4S,7S,8R,8aR)-8-acetamido-2,2-dimethylhexahydro-4,7-epoxy[1,3]dioxolo[4,5-d]oxepin-4-yl)methoxy)pentanoate (285 mg, 0.664 mmol) in DCM (5 mL) was added TFA (5 mL) was stirred at room temperature for 4 hrs. LC-MS showed the reaction was complete. Solvent was evaporated to give 5-(((1S,2R,3R,4R,5S)-4-acetamido-2,3-dihydroxy-6,8-dioxabicyclo[3.2.1]octan-1-yl)methoxy)pentanoic acid. MS (ESI): 334.3 (M+H)+. Directly use for next step without purification.

### Step 6

[1628] To a solution of 5-(((1S,2R,3R,4R,5S)-4-acetamido-2,3-dihydroxy-6,8-dioxabicyclo[3.2.1]octan-1-yl)methoxy)pentanoic acid (221 mg, 0.664 mmol) in DCM (10 mL) was added DIPEA (2313 μl, 13.28 mmol), HBTU (208 mg, 0.548 mmol), HOBT (67.3 mg, 0.498 mmol), a solution of benzyl 5-((1,19-diamino-10-((3-aminopropyl)amino)-3-oxopropoxy)methyl)-5,15-dioxo-8,12-dioxa-4,16-diazanonadecan-10-yl)amino)-5-oxopentanoate (118 mg, 0.166 mmol) (GL08-02) in DMF (3.0 mL) and DCM (5.0 mL). The reaction mixture was stirred at room temperature for overnight. LC-MS showed the desired product. Solvent was evaporated under reduced pressure to give a residue, which was purified by ISCO (24 g gold cartridge) eluting with DCM to 80% MeOH in DCM to give benzyl 18,18-bis(17-((1S,2R,3R,4R,5S)-4-acetamido-2,3-dihydroxy-6,8-dioxabicyclo[3.2.1]octan-1-yl)-5,11-dioxo-2,16-dioxa-6,10-diazaheptadecyl)-1-((1S,2R,3R,4R,5S)-4-acetamido-2,3-dihydroxy-6,8-dioxabicyclo[3.2.1]octan-1-yl)-7,13,20-trioxo-2,16-dioxa-8,12,19-triazatetracosan-24-oate (272 mg, 0.164 mmol, 99% yield) (product @ tube 30 to 42 (40% MeOH in DCM to 60% MeOH in DCM)). ¹H NMR (500 MHz, DMSO-d₆) δ 7.89 (d, J=7.8 Hz, 3H), 7.81 (t, J=5.7 Hz, 3H), 7.75 (s, 3H), 7.34 (q, J=7.5, 6.9 Hz, 5H), 7.05 (s, 1H), 5.07 (s, 5H), 4.83 (d, J=5.3 Hz, 3H), 4.56 (d, J=7.1 Hz, 3H), 3.73 (dd, J=23.3, 9.2 Hz, 6H), 3.64 (d, J=7.0 Hz, 6H), 3.58-3.35 (m, 27H), 3.02 (p, J=6.2 Hz, 12H), 2.33 (t, J=7.6 Hz, 2H), 2.26 (t, J=6.4 Hz, 6H), 2.10 (t, J=7.6 Hz, 2H), 2.04 (t, J=7.4 Hz, 6H), 1.82 (s, 9H), 1.72 (q, J=7.6 Hz, 2H), 1.52-1.39 (m, 18H); MS (ESI), 1656.3 (M+H)⁺.

### Step 7

[1629] To a solution of benzyl 18,18-bis(17-((1S,2R,3R,4R,5S)-4-acetamido-2,3-dihydroxy-6,8-dioxabicyclo[3.2.1]octan-1-yl)-5,11-dioxo-2,16-dioxa-6,10-diazaheptadecyl)-1-((1S,2R,3R,4R,5S)-4-acetamido-2,3-dihydroxy-6,8-dioxabicyclo[3.2.1]octan-1-yl)-7,13,20-trioxo-2,16-dioxa-8,12,19-triazatetracosan-24-oate (270 mg, 0.163 mmol) in EtOAc (10 mL) was added 10% Pd—C (50 mg), and MeOH (5.0 mL), and triethylsilane (1042 μl, 6.52 mmol). The reaction mixture was stirred at room temperature for 1 hr, filtered, and concentrated to give 18,18-bis(17-((1S,2R,3R,4R,5S)-4-acetamido-2,3-dihydroxy-6,8-dioxabicyclo[3.2.1]octan-1-yl)-5,11-dioxo-2,16-dioxa-6,10-diazaheptadecyl)-1-((1S,2R,3R,4R,5S)-4-acetamido-2,3-dihydroxy-6,8-dioxabicyclo[3.2.1]octan-1-yl)-7,13,20-trioxo-2,16-dioxa-8,12,19-triazatetracosan-24-oic acid (246 mg, 0.157 mmol, 96% yield) as a white solid. ¹H NMR (500 MHz, DMSO-d₆) δ 11.99 (brs, 1H), 7.89 (d, J=7.9 Hz, 3H), 7.82 (t, J=5.4 Hz, 3H), 7.75 (t, J=5.7 Hz, 3H), 7.03 (s, 1H), 5.07 (d, J=1.6 Hz, 3H), 4.83 (brs, 3H), 4.56 (brs, 3H), 3.79-3.68 (m, 6H), 3.64 (d, J=7.2 Hz, 6H), 3.58-3.34 (m, 27H), 3.02 (p, J=6.3 Hz, 12H), 2.27 (t, J=6.4 Hz, 6H), 2.17 (t, J=7.5 Hz, 2H), 2.08 (t, J=7.5 Hz, 2H), 2.04 (t, J=7.3 Hz, 6H), 1.82 (s, 9H), 1.65 (p, J=7.5 Hz, 2H), 1.54-1.40 (m, 18H); MS(ESI), 1566.3 (M+H)+.

### Example 4B

[1630] Synthesis of 18,18-bis(17-((1S,2R,3R,4R,5S)-4-acetamido-2,3-dihydroxy-6,8-dioxabicyclo[3.2.1]octan-1-yl)-5,11-dioxo-2,16-dioxa-6,10-diazaheptadecyl)-1-((1S,2R,3R,4R,5S)-4-acetamido-2,3-dihydroxy-6,8-dioxabicyclo[3.2.1]octan-1-yl)-7,13,20-trioxo-2,16-dioxa-8,12,19-triazahentriacontan-31-oic acid

[chemical structure]

[1631] 18,18-bis(17-((1S,2R,3R,4R,5S)-4-acetamido-2,3-dihydroxy-6,8-dioxabicyclo[3.2.1]octan-1-yl)-5,11-dioxo-2,16-dioxa-6,10-diazaheptadecyl)-1-((1S,2R,3R,4R,5S)-4-acetamido-2,3-dihydroxy-6,8-dioxabicyclo[3.2.1]octan-1-yl)-7,13,20-trioxo-2,16-dioxa-8,12,19-triazahentriacontan-31-oic acid was synthesized using the same procedure as 18,18-bis(17-((1S,2R,3R,4R,5S)-4-acetamido-2,3-dihydroxy-6,8-dioxabicyclo[3.2.1]octan-1-yl)-5,11-dioxo-2,16-dioxa-6,10-diazaheptadecyl)-1-((1S,2R,3R,4R,5S)-4-acetamido-2,3-dihydroxy-6,8-dioxabicyclo[3.2.1]octan-1-yl)-7,13,20-trioxo-2,16-dioxa-8,12,19-triazatetracosan-24-oic acid. ¹H NMR (400 MHz, DMSO-d₆) δ 7.90 (d, J=7.8 Hz, 3H), 7.83 (t, J=5.7 Hz, 3H), 7.76 (t, J=5.7 Hz, 3H), 6.98 (d, J=6.2 Hz, 1H), 5.09 (s, 3H), 3.81-3.69 (m, 6H), 3.69-3.62 (m, 6H), 3.62-3.40 (m, 24H), 3.04 (p, J=6.1 Hz, 9H), 2.28 (t, J=6.4 Hz, 4H), 2.18 (t, J=7.3 Hz, 2H), 2.06 (t, J=7.7 Hz, 6H), 1.84 (s, 6H), 1.48 (tq, J=14.9, 7.4 Hz, 16H), 1.23 (s, 8H). MS(ESI), 1664.0 (M+H)⁺.

### Example 5. Example Compounds for Incorporating Moieties

### Synthesis of 5-(4-(4,6-bis((3-43-(5-(((2R,3R,4R,5R,6R)-3-acetamido-4,5-diacetoxy-6-(acetoxymethyl)tetrahydro-2H-pyran-2-yl)oxy)pentanamido)propyl)amino)-3-oxopropyl)amino)-1,3,5-triazin-2-yl)piperazin-1-yl)-5-oxopentanoic acid

[chemical structure]

[chemical structure]

[1633] Steps 1 to 2:

[1634] To a solid reagent 2,4,6-trichloro-1,3,5-triazine (0.500 g, 2.71 mmol) in THF (30 mL) was added tert-butyl 3-aminopropanoate HCl salt (0.985 g, 5.42 mmol) and DIPEA (2.36 ml, 13.56 mmol). The reaction mixture was stirred at room temperature for 5 hrs. LC-MS showed the desired product; MS(ESI): 402.4 (M+H)⁺. Solvent was evaporated under reduced pressure to give a residue, which was directly used for next step. To a solution of di-tert-butyl 3,3′-((6-chloro-1,3,5-triazine-2,4-diyl)bis(azanediyl))dipropionate (1.052 g, 2.71 mmol) in acetonitrile (50 mL) was added benzyl 5-oxo-5-(piperazin-1-yl)pentanoate (1.103 g, 3.80 mmol) and K2CO₃ (2.248 g, 16.27 mmol). The reaction mixture was stirred at room temperature for overnight and at 50° C. Diluted with EtOAc, filtered and concentrated under reduced pressure to give a residue, which was purified by ISCO (40 g gold) eluting with 20% EtOAc in hexane to 50% EtOAc in hexane to give di-tert-butyl 3,3′-((6-(4-(5-(benzyloxy)-5-oxopentanoyl)piperazin-1-yl)-1,3,5-triazine-2,4-diyl)bis(azanediyl))dipropionate (1.13 g, 64%) as a white solid. ¹H NMR (400 MHz, Chloroform-d) δ 7.43-7.30 (m, 5H), 5.15 (s, 2H), 3.75 (brs, 4H), 3.63 (brs, 6H), 3.43 (brs, 2H), 2.51 (q, J=7.0, 6.5 Hz, 6H), 2.42 (t, J=7.4 Hz, 2H), 2.09-1.96 (m, 2H), 1.48 (s, 18H); MS (ESI): 656.6 (M+H)⁺.

### Step 3

[1635] A solution of di-tert-butyl 3,3′-((6-(4-(5-(benzyloxy)-5-oxopentanoyl)piperazin-1-yl)-1,3,5-triazine-2,4-diyl)bis(azanediyl))dipropionate (1.10 g, 1.68 mmol) in formic acid (20 mL) was stirred at room temperature for overnight. LC-MS showed the reaction was not completed and solvent was evaporated. Formic acid (20 mL) was added to the reaction mixture and the reaction mixture was stirred at room temperature for 5 hrs. LC-MS showed the reaction was complete. Solvent was concentrated, co-evaporated with toluene (2×) and dried under vacuum for overnight to give 3,3′-((6-(4-(5-(benzyloxy)-5-oxopentanoyl)piperazin-1-yl)-1,3,5-triazine-2,4-diyl)bis(azanediyl))dipropionic acid (0.91 g, 100% yield) as a white solid. MS (ESI), 544.2 (M+H)⁺.

### Step 4

[1636] A solution of 3,3′-((6-(4-(5-(benzyloxy)-5-oxopentanoyl)piperazin-1-yl)-1,3,5-triazine-2,4-diyl)bis(azanediyl))dipropionic acid (0.91 g, 1.68 mmol) and HOBt (0.76 g, 4.36 mmol) in DCM (30 mL) and DMF (3 mL) at 0° C. was added tert-butyl (3-aminopropyl)carbamate (0.840 g, 4.36 mmol), EDC HCl salt (0.836 g, 4.36 mmol) and DIPEA (1.460 ml, 8.39 mmol). The reaction mixture was stirred at 0° C. for 15 minutes and at room temperature for 20 hrs. Solvent was evaporated to give a residue, which was dissolved in EtOAc (300 mL), washed with water (1×), saturated sodium bicarbonate (2×), 10% citric acid (2×) and water, dried over sodium sulfate, and concentrated to give a residue which was purified by ISCO (80 g gold cartridge) eluting with DCM to 30% MeOH in DCM to give benzyl 5-(4-(4,6-bis((3-((tert-butoxycarbonyl)amino)propyl)amino)-3-oxopropyl)amino)-1,3,5-triazin-2-yl)piperazin-1-yl)-5-oxopentanoate (1.11 g, 77% yield) as a white solid. MS (ESI): 857.5 (M+H)⁺.

### Step 5

[1637] A solution of benzyl 5-(4-(4,6-bis((3-((3-((tert-butoxycarbonyl)amino)propyl)amino)-3-oxopropyl)amino)-1,3,5-triazin-2-yl)piperazin-1-yl)-5-oxopentanoate (212.3 mg, 0.250 mmol) in DCM (5.0 mL) was added TFA (3.0 mL). The reaction mixture was stirred at room temperature for 3 hrs. Solvent was evaporated under reduced pressure, use directly for next step without purification. MS (ESI): 656.3 (M+H)⁺.

### Step 6

[1638] To a solution of 5-(((2R,3R,4R,5R,6R)-3-acetamido-4,5-diacetoxy-6-(acetoxymethyl)tetrahydro-2H-pyran-2-yl)oxy)pentanoic acid (333 mg, 0.740 mmol) in DCM (5 mL) was added DIPEA (2.16 ml, 12.4 mmol), HBTU (235 mg, 0.620 mmol), HOBT (67 mg, 0.50 mmol), a solution of benzyl 5-(4-(4,6-bis((3-((3-aminopropyl)amino)-3-oxopropyl)amino)-1,3,5-triazin-2-yl)piperazin-1-yl)-5-oxopentanoate (163 mg, 0.250 mmol) in DCM (3.0 mL). The reaction mixture was stirred at room temperature for 3 hrs. LC-MS showed the desired product. Solvent was evaporated under reduced pressure to give a residue, which was purified by ISCO (24 g gold cartridge) eluting with DCM to 50% MeOH in DCM to give (2R,2′R,3R,3′R,4R,4′R,5R,5′R,6R,6′R)-((((((3,3′-((6-(4-(5-(benzyloxy)-5-oxopentanoyl) piperazin-1-yl)-1,3,5-triazine-2,4-diyl)bis(azanediyl))bis(propanoyl))bis(azanediyl))bis(propane-3,1-diyl))bis(azanediyl))bis(5-oxopentane-5,1-diyl))bis(oxy))bis(5-acetamido-2-(acetoxymethyl)tetrahydro-2H-pyran-6,3,4-triyl)tetraacetate (460 mg) containing some HOBt. MS (ESI), 1515.7 (M+H)⁺.

### Step 7

[1639] To a solution of (2R,2′R,3R,3′R,4R,4′R,5R,5′R,6R,6′R)-((((((3,3′-((6-(4-(5-(benzyloxy)-5-oxopentanoyl)piperazin-1-yl)-1,3,5-triazine-2,4-diyl)bis(azanediyl))bis(propanoyl))bis(azanediyl))bis(propane-3,1-diyl))bis(azanediyl))bis(5-oxopentane-5,1-diyl))bis(oxy))bis(5-acetamido-2-(acetoxymethyl)tetrahydro-2H-pyran-6,3,4-triyl)tetraacetate (0.44 g, 0.290 mmol) in EtOAc (20 mL) was added 10% Pd—C(40 mg) followed by 2.0 mL MeOH under Ar. Triethylsilane (2.784 ml, 17.43 mmol) was added to the reaction mixture slowly. The reaction mixture was stirred at room temperature for 2 hrs, filtered through celite, washed with 50% MeOH in EtOAc. Solvents were evaporated under reduced pressure to give 5-(4-(4,6-bis((3-((3-(5-(((2R,3R,4R,5R,6R)-3-acetamido-4,5-diacetoxy-6-(acetoxymethyl)tetrahydro-2H-pyran-2-yl)oxy)pentanamido)propyl)amino)-3-oxopropyl)amino)-1,3,5-triazin-2-yl)piperazin-1-yl)-5-oxopentanoic acid (0.43 g, 100% yield) a white solid. MS (ESI): 1425.0 (M+H)⁺.

### Example 6. Example Compounds for Incorporating Moieties

[1640] Synthesis of 5-(4-(4,6-bis((3-((3-(5-(((1S,2R,3R,4R,5S)-4-acetamido-2,3-dihydroxy-6,8-dioxabicyclo[3.2.1]octan-1-yl)methoxy)pentanamido)propyl)amino)-3-oxopropyl)amino)-1,3,5-triazin-2-yl)piperazin-1-yl)-5-oxopentanoic acid.

[chemical structure]

### Step 1

[1641] A solution of benzyl 5-(4-(4,6-bis((3-((3-((tert-butoxycarbonyl)amino)propyl)amino)-3-oxopropyl)amino)-1,3,5-triazin-2-yl)piperazin-1-yl)-5-oxopentanoate (212.3 mg, 0.250 mmol) in DCM (5.0 mL) was added TFA (3.0 mL). The reaction mixture was stirred at room temperature for 3 hrs. Solvent was evaporated under reduced pressure, use directly for next step without purification. MS (ESI): 656.3 (M+H)⁺.

### Step 2

[1642] To a solution of tert-butyl 5-(((3aR,4S,7S,8R,8aR)-8-acetamido-2,2-dimethylhexahydro-4,7-epoxy[1,3]dioxolo[4,5-d]oxepin-4-yl)methoxy)pentanoate (373 mg, 0.870 mmol) in DCM (5 mL) was added TFA (5 mL) was stirred at room temperature for 4 hrs. LC-MS showed the reaction was complete. Solvent was evaporated to give 5-(((1S,2R,3R,4R,5S)-4-acetamido-2,3-dihydroxy-6,8-dioxabicyclo[3.2.1]octan-1-yl)methoxy)pentanoic acid. MS (ESI): 334.3 (M+H)+. Directly use for next step without purification.

### Step 3

[1643] To a solution of 55-(((1S,2R,3R,4R,5S)-4-acetamido-2,3-dihydroxy-6,8-dioxabicyclo[3.2.1]octan-1-yl)methoxy)pentanoic acid (289 mg, 0.870 mmol) in DCM (5 mL) was added DIPEA (2.16 ml, 12.4 mmol), HBTU (330 mg, 0.870 mmol), HOBT (67 mg, 0.50 mmol), a solution of benzyl 5-(4-(4,6-bis((3-((3-aminopropyl)amino)-3-oxopropyl)amino)-1,3,5-triazin-2-yl)piperazin-1-yl)-5-oxopentanoate (163 mg, 0.250 mmol) in DCM (3.0 mL). The reaction mixture was stirred at room temperature for 3 hrs. LC-MS showed the desired product. Solvent was evaporated under reduced pressure to give a residue, which was purified by ISCO (24 g gold cartridge) eluting with DCM to 50% MeOH in DCM to give benzyl 5-(4-(4,6-bis((3-((3-(5-(((1S,2R,3R,4R,5S)-4-acetamido-2,3-dihydroxy-6,8-dioxabicyclo[3.2.1]octan-1-yl)methoxy)pentanamido)propyl)amino)-3-oxopropyl)amino)-1,3,5-triazin-2-yl)piperazin-1-yl)-5-oxopentanoate (227 mg, 71%). MS (ESI), 1287.0 (M+H)⁺.

### Step 4

[1644] To a solution of benzyl 5-(4-(4,6-bis((3-((3-(5-(((1S,2R,3R,4R,5S)-4-acetamido-2,3-dihydroxy-6,8-dioxabicyclo[3.2.1]octan-1-yl)methoxy)pentanamido)propyl)amino)-3-oxopropyl)amino)-1,3,5-triazin-2-yl)piperazin-1-yl)-5-oxopentanoate (0.167 g, 0.130 mmol) in EtOAc (10 mL) was added 10% Pd—C(50 mg) followed by 2.0 mL MeOH under Ar. Triethylsilane (1.66 ml, 10.39 mmol) was added to the reaction mixture slowly. The reaction mixture was stirred at room temperature for 2 hrs, filtered through celite, washed with 50% MeOH in EtOAc. Solvents were evaporated under reduced pressure to give 5-(4-(4,6-bis((3-((3-(5-(((1S,2R,3R,4R,5S)-4-acetamido-2,3-dihydroxy-6,8-dioxabicyclo[3.2.1]octan-1-yl)methoxy)pentanamido)propyl)amino)-3-oxopropyl)amino)-1,3,5-triazin-2-yl)piperazin-1-yl)-5-oxopentanoic acid (32 mg, 21% yield) a white solid. MS (ESI): 1196.7 (M+H)⁺.

### Example 7. Example Preparation of Certain Phosphoramidites

[1645] In some embodiments, the present disclosure provides monomers (phosphoramidites) and methods thereof for oligonucleotide preparation. In some embodiments, provided phosphoramidites comprise 5′-end structures that provides special and/or greatly improved activities and/or properties. In some embodiments, provided phosphoramidites comprise desired chemical moieties, e.g., carbohydrate moieties, lipid moieties, etc., for incorporation into oligonucleotides. In some embodiments, provided phosphoramidites comprise linkers/handles for incorporation of desired chemical moieties, e.g., carbohydrate moieties, lipid moieties, etc. Many technologies can be utilized to prepare phosphoramidites in accordance with the present disclosure, including but not limited to those described in WO/2010/064146, WO/2011/005761, WO/2013/012758, WO/2014/010250, US2013/0178612, WO/2014/012081, WO/2015/107425, WO/2017/015555, and WO/2017/062862, the methods and reagents of each of which are incorporated herein by reference. Provided below as examples are preparation of certain phosphoramidites.

### Example 7-1. Preparation of Thymidine-5′-dimethylvinylphosphonate-2′-deoxy-3′—CNE Phosphoramidite

[chemical structure]

[chemical structure]

### Preparation of Compound 7-1-2

[chemical structure]

[1648] To a solution of compound 7-1-1 (20.00 g, 36.72 mmol, 1.00 eq.) in DMF (100.00 mL) was added imidazole (25.00 g, 367.20 mmol, 10.00 eq.) followed by TBDPSCl (50.47 g, 183.60 mmol, 47.17 mL, 5.00 eq.). The reaction mixture was stirred at 25° C. for 16 h. TLC (Dichloromethane: Methanol=1:1) showed compound 7-1-1 was consumed completely. EtOAc (300 mL) was added and the mixture was washed with water (60 mL*3). The organic phase was dried over Na₂SO₄, filtered and concentrated. The residue was purified by column chromatography on silica gel (Petroleum ether:Ethyl acetate=20:1, 1:1, 1:4). Compound 7-1-2 (30.00 g) was obtained as white foamy solid. ¹H NMR: (CDCl₃, 400 MHz) δ=8.165 (s, 1H), 7.575-7.080 (m, 21H), 6.718-6.741 (m, 4H), 6.473 (d, J=2.8 Hz, 1H), 4.520-4.534 (m, 1H), 4.037-4.043 (d, J=2.4 Hz, 1H), 3.758 (s, 6H), 3.184-3.217 (m, 1H), 2.841-2.874 (m, 1H), 2.319-2.338 (m, 1H), 2.025-2.078 (m, 1H), 1.321 (s, 3H), 1.021 (s, 9H).

### Preparation of Compound 7-1-3

[chemical structure]

[1650] To a solution of compound 7-1-2 (25.00 g, 31.93 mmol, 1.00 eq.) in DCM (250 mL) was added TFA (8.37 g, 73.44 mmol, 5.44 mL, 2.30 eq.). The color of the solution turned to red. Et₃SiH (8.17 g, 70.24 mmol, 11.19 mL, 2.20 eq.) was added at 25° C. The reaction mixture was stirred at 25° C. for 2 h and the red solution became colorless. TLC (Petroleum ether:Ethyl acetate=1:1) showed compound 7-1-2 was consumed completely. The solvent was removed under reduced pressure, and the residue was dissolved in EtOAc (100 mL). The organic phase was washed with NaHCO₃ (40 mL), brine, dried over Na₂SO₄, filtered and concentrated. The residue was purified by column chromatography on silica gel (Petroleum ether:Ethyl acetate=20:1, 1:1). Compound 7-1-3 (9.80 g, 56.20% yield, 88% purity) was obtained as white solid. ¹H NMR: (CDCl₃, 400 MHz) δ=8.108 (s, 1H), 7.643 (s, 1H), 7.403-7.412 (m, 6H), 7.269 (d, J=4.8 Hz, 2H), 6.217 (d, J=5.6 Hz, 1H), 4.451 (s, 1H), 3.975 (s, 1H), 3.631 (d, J=12 Hz, 1H), 3.255 (s, 1H), 2.264-2.296 (m, 1H), 2.136-2.184 (m, 1H), 1.957 (s, 1H), 1.859 (s, 3H), 1.090 (s, 9H).

### Preparation of Compound 7-1-4

[chemical structure]

[1652] To a solution of compound 7-1-3 (18.00 g, 37.45 mmol, 1.00 eq.) in DCM (500 mL) was added DMP (17.47 g, 41.20 mmol, 12.75 mL, 1.10 eq.) at 0° C. The reaction mixture was stirred at 25° C. for 3 h. TLC (Petroleum ether:Ethyl acetate=1:1) showed the reaction was complete. Na₂SO₃ (sat., 100 mL) and NaHCO₃ (sat.100 mL) was added successively. The mixture was extracted with DCM (100 mL*3). The organic phase was dried over Na₂SO₄ and concentrated. Compound 7-1-4 (17.92 g, crude) was obtained as yellow oil.

### Preparation of Compound 7-1-5

[chemical structure]

[1654] To a solution of compound 7-1-4A (16.08 g, 69.26 mmol, 1.85 eq.) in THF (29 mL) was added t-BuOK (1 M, 69.26 mL, 1.85 eq.) at 0° C. The mixture was stirred at 0° C. for 10 min, then warmed up to 25° C. for 30 min. The above mixture was added to a solution of compound 7-1-4 (17.92 g, 37.44 mmol, 1.00 eq.) in THF (36 mL) at 0° C. The reaction mixture was stirred at 0° C. for 1 h and then allowed to warm up to 25° C. in 80 min. TLC (Dichloromethane: Methanol=20:1) showed the reaction was complete. To the reaction mixture water (200 mL) was added and extracted with EtOAc (300 mL*4). The organic phase was dried (Na₂SO₄), filtered and concentrated. The residue was purified by column chromatography on silica gel (PE (10% DCM): EA=10:1, 1:8). Compound 7-1-5 (15.00 g) was obtained as yellow solid.

### Preparation of Compound 7-1-6

[chemical structure]

[1656] To a solution of compound 7-1-5 (21.00 g, 35.92 mmol, 1.00 eq.) in THF (60 mL) was added N, N-diethylethanamine; trihydrofluoride (28.95 g, 179.59 mmol, 29.24 mL, 5.00 eq.) at 25° C. The reaction mixture was stirred at 25° C. for 20 h. TLC (Dichloromethane: Methanol=10:1) showed the reaction was complete. The reaction mixture was concentrated under reduced pressure and the mixture was neutralized with Na₂CO₃ (aq., sat) until pH=7. The water phase was freeze-dried. The freeze-drying solid was washed with DCM: MeOH=10:1(300 mL*2). The organic phase was concentrated. The residue obtained was purified by column chromatography on silica gel (Dichloromethane: Methanol=100:1,100:8). Compound 7-1-6 (5.20 g, 15.02 mmol, 41.81% yield) was obtained as white solid. ¹H NMR: (CDCl₃, 400 MHz) δ=9.521 (s, 1H), 7.120 (s, 1H), 6.974-7.074 (m, 1H), 6.372-6.405 (m, 1H), 5.961-6.050 (m, 1H), 4.684 (s, 1H), 4.504-4.518 (m, 1H), 4.393-4.409 (m, 1H), 3.726-3.775 (m, 6H), 3.151-3.180 (m, 2H), 2.411-2.427 (m, 1H), 1.930-2.218 (m, 1H), 1.927 (s, 3H).

### Preparation of Compound 7-1-7

[chemical structure]

[1658] To a solution of compound 7-1-6 (3.80 g, 10.97 mmol, 1.00 eq.) in DMF (23 mL) was added 5-ethylsulfanyl-2H-tetrazole (1.43 g, 10.97 mmol, 1.00 eq.), 1-methylimidazole (1.80 g, 21.94 mmol, 1.75 mL, 2.00 eq.) and 3-bis(diisopropylamino)phosphanyloxypropanenitrile (4.96 g, 16.46 mmol, 5.22 mL, 1.50 eq.). The reaction mixture was stirred at 25° C. under N2 for 3 h. TLC (Dichloromethane: Methanol=10:1) showed the reaction was complete. The reaction mixture was diluted with EtOAc (200 mL). The reaction mixture was washed with aq. saturated. NaHCO₃ solution (20 mL*4), dried over Na₂SO₄, filtered and concentrated under reduced pressure. The column was eluted with MeOH (20 min), EA (20 min), Petroleum ether (20 min), and Petroleum ether/Ethyl acetate (20 min). The residue thus obtained was purified by silica gel column chromatography (elution with Petroleum ether: EtOAc=10:1, 1:1 and then EtOAc/Acetonitrile=1000:1,100:2,100:4). Compound 7-1-7 (4.80 g, 8.78 mmol, 80.04% yield) was obtained as yellow solid. MS: LCMS, Calculated C₂₂H36N408P2, 546.2008; Observed in +Ve mode 568.95; 569.43[M+Na]. ¹H NMR: (CDCl₃, 400 MHz) δ=9.489 (s, 1H), 7.233 (s, 1H), 6.835-7.035 (m, 1H), 6.303-6.337 (m, 1H), 5.931-5.983 (m, 1H), 4.388-4.504 (m, 1H), 3.703-3.846 (m, 1H), 3.666-3.694 (m, 6H), 3.533-3.559 (m, 2H), 2.594-2.702 (m, 2H), 2.162-2.578 (m, 2H), 1.863 (s, 3H), 1.111-1.189 (m, 12H). ¹³C NMR (101 MHz, CDCl₃) δ 163.66, 162.54, 150.47, 150.40, 148.68, 148.61, 148.41, 148.35, 135.10, 135.01, 118.73, 118.25, 117.76, 117.61, 116.91, 116.85, 116.38, 111.74, 84.83, 84.79, 84.75, 84.72, 84.62, 84.56, 84.53, 84.50, 84.40, 84.33, 77.40, 77.29, 77.09, 76.77, 76.03, 75.87, 75.49, 75.48, 75.34, 75.32, 58.21, 58.19, 58.16, 58.12, 58.00, 57.92, 52.59, 52.55, 52.54, 52.52, 52.49, 52.46, 45.33, 45.27, 43.43, 43.40, 43.30, 43.27, 38.45, 38.40, 38.37, 36.45, 24.62, 24.57, 24.54, 24.49, 24.46, 22.96, 22.94, 22.88, 22.85, 20.47, 20.39, 20.37, 20.30, 20.11, 20.04, 12.50, 12.48. ³¹P NMR (162 MHz, CDCl₃) δ 149.40, 149.38, 19.99, 19.64, 14.10.

### Example 7-2. Stereopure L-DPSE-5′-DMT-5′VP-dT Amidite, 7-2-8

### Preparation of L-DPSE-NOPCl

[chemical structure]

[1660] L-DPSE (8.82 g, 28.5 mmol) was dried by azeotropic evaporation with anhydrous toluene (60 ml) at 35° C. in a rotary evaporator and further dried in high vacuum for overnight. A solution of this dried L-DPSE and 4-methylmorpholine (5.82 g, 6.33 mL, 57.5 mmol) which was dissolved in anhydrous toluene (50 ml) was added to a solution of PCl₃ (4.0 g, 2.5 mL, 29.0 mmol) in anhydrous toluene (25 ml) placed in 250 mL three neck round bottomed flask which was cooled at −5° C. under argon (start Temp: −2° C., Max: 5° C. temp, 10 min addition) and the reaction mixture was stirred at 0° C. for another 40 min. After that the precipitated white solid was filtered by vacuum under argon using special filter tube (Chemglass: Medium Frit, Airfree, Schlenk). The solvent was removed by rotary evaporator under argon at bath temperature (25° C.) and the crude oily mixture was obtained and dried under vacuum overnight (˜15 h) and used for next step.

### Preparation of L-DPSE-5′-DMT-5′VP-dT Amidite

[chemical structure]

[1662] Compound 7-2-6 (7.0 g, 20.2 mmol) was dried two times by co-evaporation with 75 mL of anhydrous toluene at 45° C. and kept at high vacuum for overnight. Then the dried Compound 7-2-6, was dissolved in dry THF (70 mL) in a 250 mL three neck flasks under argon, followed by the addition of triethylamine (14 mL, 101 mmol) and the mixture was cooled to −45° C. To this cooled reaction mixture was added a solution of the crude L-DPSE-NOPCl (28.5 mmol, 1.4 eq, in THF 50 mL) from the previous step via syringe dropwise (˜10 min, maintaining the internal temperature −40 to −35° C.). The reaction mixture was then gradually warmed to 5° C. After 30 min at 5° C., TLC and LC-MS analysis indicated the complete conversion of SM to product (total reaction time 2 h). The reaction mixture was cooled in an ice bath, and was quenched by addition of water (0.36 mL, 20.2 mmol) and stirred for 10 min followed by added anhydrous Mg₂SO₄ (3.0 g, 20.2 mmol). The reaction was filtered through Airfree, Schlenk filter tube, washed with dry THF (50 mL) and evaporated under rotary evaporation at 28° C. to afford the pale-yellow solid of the crude product, which was dried under high vacuum for overnight. The dried crude product was purified by 120 silica column (which was pre-deactivated with 3 column volume of ethyl acetate with 5% TEA) using ethyl acetate/hexane mixture with 5% TEA as a solvent. After column purification, fractions were analyzed by TLC and LC-MS and pooled together. Solvent was evaporated in a rotary evaporator at 28° C. and the residue was dried under high vacuum to afford the product as a white solid. Yield: 11.8 g (87%). ¹H NMR (400 MHz, Chloroform-d) δ 7.46 (ddt, J=16.5, 7.6, 2.7 Hz, 4H), 7.33-7.17 (m, 6H), 6.93-6.88 (m, 1H), 6.75 (ddd, J=22.6, 17.2, 4.4 Hz, 1H), 6.16 (dd, J=7.5, 6.3 Hz, 1H), 5.85 (ddd, J=19.2, 17.1, 1.8 Hz, 1H), 4.71 (dt, J=8.7, 5.7 Hz, 1H), 4.38 (dp, J=10.7, 3.6 Hz, 1H), 4.15 (tt, J=5.6, 2.7 Hz, 1H), 3.68 (dd, J=11.1, 3.7 Hz, 6H), 3.55-3.29 (m, 2H), 3.09 (tdd, J=10.8, 8.8, 4.3 Hz, 1H), 2.11 (ddd, J=13.9, 6.3, 3.3 Hz, 1H), 1.96 (s, 1H), 1.87 (d, J=1.2 Hz, 3H), 1.85-1.73 (m, 2H), 1.70-1.49 (m, 2H), 1.38 (ddd, J=15.9, 10.4, 6.3 Hz, 2H), 1.26-1.11 (m, 2H), 0.60 (s, 3H). ³¹P NMR (162 MHz, CDCl₃) δ 152.41, 19.95. ¹³C NMR (101 MHz, CDCl₃) δ 171.07, 163.62, 163.59, 150.21, 150.19, 148.49, 148.43, 136.61, 135.84, 135.15, 134.57, 134.33, 129.48, 129.42, 127.97, 127.93, 127.81, 118.38, 116.50, 111.52, 85.02, 84.72, 84.70, 84.51, 84.48, 79.25, 79.16, 77.40, 77.28, 77.08, 76.76, 74.93, 74.91, 74.83, 74.81, 68.01, 67.98, 60.35, 52.60, 52.55, 52.47, 52.42, 47.03, 46.67, 38.12, 38.08, 27.18, 25.85, 25.82, 21.01, 17.58, 17.54, 14.19, 12.58,-3.00,-3.27. MS: LCMS, Calculated C₃₂H41N3O8P2Si, 685.7255: Observed in +Ve mode: 686.21 [M+H], 708.14 [M+Na].

### Example 7-3. Synthesis of 5′-DMT-2′OMe-5-Lipid-3′—CNE Phosphoramidite —Incorporation of Desired Moieties Through Nucleobases

[chemical structure]

### Preparation of Compound 7-3-2

[chemical structure]

[1665] A mixture of compound 7-3-1 (13.00 g, 18.94 mmol), prop-2-yn-1-amine (2.09 g, 37.87 mmol, 2.43 mL), CuI (901.63 mg, 4.73 mmol), Pd(PPh₃)₄ (2.19 g, 1.89 mmol) and TEA (3.83 g, 37.87 mmol, 5.25 mL) in DMF (130 mL) was degassed and purged with N2 for 3 times, and then the mixture was stirred at 25° C. for 12 hour under N2 atmosphere and dark. LC-MS showed Compound 7-3-1 was consumed completely and one main peak with desired MS was detected. The mixture was concentrated in vacuo. The residue was purified by column chromatography (SiO₂, Dichloromethane/Methanol=100/1 to 0:1). Compound 7-3-2 (11.00 g, crude) was obtained as a yellow solid. ¹H NMR (400 MHz, CDCl₃): δ=8.23 (s, 1H), 7.48-7.14 (m, 13H), 6.83 (br d, J=7.3 Hz, 5H), 5.94 (br s, 1H), 4.48 (br t, J=5.8 Hz, 2H), 4.05 (br d, J=6.4 Hz, 2H), 3.93 (br d, J=2.9 Hz, 1H), 3.81-3.70 (m, 8H), 3.62 (s, 4H), 3.52 (br d, J=11.0 Hz, 2H), 3.35 (br d, J=9.0 Hz, 1H). LCMS: (M+H⁺): 614.2. TLC (Dichloromethane/Methanol=10:1) Rf=0.19.

### Preparation of Compound 7-3-3

[chemical structure]

[1667] To a solution of palmitic acid (5.06 g, 19.72 mmol) in DCM (130 mL) was added TEA (3.63 g, 35.85 mmol, 4.97 mL), EDCI (5.15 g, 26.89 mmol), HOBt (3.63 g, 26.89 mmol), and Compound 7-3-3 (11.00 g, 17.93 mmol). The mixture was stirred at 25° C. for 1 hour. LC-MS showed Compound 7-3-3 was consumed completely and one main peak with desired MS was detected. The mixture was concentrated in vacuo. The residue was purified by column chromatography (SiO₂, Dichloromethane: Ethyl acetate=10/1 to 0:1 Dichloromethane: Ethyl acetate=100/1 to 0:1). Compound 7-3-3 (6.20 g, 40.58% yield) was obtained as a yellow solid. ¹H NMR (400 MHz, CDCl₃): δ=8.25 (s, 1H), 7.50-7.14 (m, 10H), 6.90-6.77 (m, 4H), 5.93 (d, J=2.0 Hz, 1H), 5.01 (br s, 1H), 4.53-4.44 (m, 1H), 4.06 (br d, J=6.8 Hz, 1H), 3.94 (dd, J=2.0, 5.1 Hz, 1H), 3.83-3.73 (m, 9H), 3.63 (s, 3H), 3.55-3.48 (m, 1H), 3.39 (dd, J=2.5, 11.1 Hz, 1H), 2.79 (q, J=7.1 Hz, 1H), 1.85-1.76 (m, 2H), 1.50-1.41 (m, 2H), 1.24 (br s, 22H), 0.87 (t, J=6.7 Hz, 3H). ¹³CNMR (100 MHz, CDCl₃): δ=172.37, 162.32, 158.66, 158.58, 158.55, 149.58, 144.63, 142.49, 135.55, 135.44, 130.14, 130.00, 129.94, 128.08, 127.86, 126.91, 113.51, 113.35, 99.62, 89.56, 87.56, 86.85, 83.77, 83.68, 74.14, 68.49, 61.77, 58.82, 55.24, 45.30, 36.10, 31.89, 29.84, 29.67, 29.63, 29.49, 29.37, 29.33, 25.42, 22.66, 14.79, 14.11, 9.74. LCMS: (M+H⁺): 850.4.

### Preparation of 5′-DMT-2′OMe-5-Lipid-3′—CNE Phosphoramidite

[chemical structure]

[1669] Compound 7-3-3 (2.8 g, 3.29 mmol) was co-evaporated with anhydrous toluene two times (25 mL×2) and dried under high vacuum overnight. The dried foamy solid was dissolved in anhydrous DMF (5 ml) and was added 5-ethylthio-1H-tetrazole (0.43 g, 3.29 mmol), N-methylimidazole (0.052 mL, 0.66 mmol) followed by 2-cynoethyl-N,N,N′,N′-tetraisopropylphosphordiamidite (1.49 g, 4.93 mmol). The reaction mixture was stirred at room temperature under argon atmosphere for overnight. After TLC indicated completion, the reaction was diluted with EtOAc (70 mL) and washed with aq. saturated. NaHCO₃ solution (10 mL), and dried over Mg₂SO₄. The solvent was evaporated under reduced pressure and dried in high vacuum for night. The dried crude product was purified by Combi-Flash Rf (Teledyne ISCO) using 80 g silica column (which was pre-deactivated with 3 column volume of ethyl acetate with 5% TEA) with Hexane/Ethyl acetate/Acetonitrile which contains 5% TEA as an eluent to afford 5′-DMT-2′OMe-5-Lipid-3′CNE phosphoramidite as a foamy solid. Yield 3.1 g (90%). ³¹P NMR (162 MHz, CDCl₃) δ 150.58(s) 150.26(s). ¹³C NMR (101 MHz, CDCl₃) δ 172.20, 172.18, 161.78, 161.66, 158.70, 158.68, 149.45, 149.35, 144.71, 144.57, 142.69, 142.62, 137.91, 135.63, 135.53, 135.49, 135.40, 130.16, 130.11, 128.08, 128.06, 128.01, 127.00, 126.97, 117.71, 117.51, 113.39, 113.36, 113.32, 99.75, 99.46, 89.30, 89.26, 88.49, 88.00, 87.05, 86.84, 83.86, 83.04, 82.98, 82.93, 82.66, 77.39, 77.27, 77.07, 76.75, 74.45, 74.30, 69.88, 69.77, 69.64, 62.10, 61.24, 58.94, 58.92, 58.65, 58.47, 58.44, 57.97, 57.76, 55.30, 55.27, 43.35, 43.32, 43.23, 43.19, 36.11, 36.09, 33.26, 31.90, 29.88, 29.67, 29.65, 29.63, 29.58, 29.50, 29.37, 29.33, 25.41, 24.70, 24.64, 24.61, 24.57, 24.54, 24.50, 22.66, 20.47, 20.40, 20.34, 20.27, 14.82, 14.09. ¹H NMR (400 MHz, Chloroform-d) δ 7.40 (dd, J=10.5, 7.6 Hz, 2H), 7.35-7.12 (m, 7H), 6.78 (ddd, J=9.0, 4.2, 2.7 Hz, 4H), 4.82 (dt, J=22.1, 4.9 Hz, 1H), 4.57-4.38 (m, 1H), 4.24-4.10 (m, 1H), 4.06-3.96 (m, 1H), 3.86-3.67 (m, 7H), 3.67-3.58 (m, 2H), 3.57-3.39 (m, 6H), 3.25 (ddd, J=13.5, 11.3, 2.8 Hz, 1H), 2.55 (t, J=6.1 Hz, 1H), 2.30 (t, J=6.2 Hz, 1H), 1.71 (qd, J=7.4, 7.0, 1.4 Hz, 2H), 1.38 (dtt, J=10.5, 7.7, 2.8 Hz, 2H), 1.09 (dd, J=6.7, 5.1 Hz, 17H), 0.97 (d, J=6.8 Hz, 3H), 0.80 (t, J=6.6 Hz, 3H). MS: LCMS: Calculated, C59H82N5O10P; 1051.5730; Observed +Ve mode: m/z: 1153.69 [M+Et₃N].

### Example 7-4. Synthesis of 5′-(R)—C-Me-5′-DMT-dT-CNE Amidite

[chemical structure]

### Preparation of Compound 7-4-6B

[chemical structure]

[1672] To a solution of compound 7-4-5 (46.00 g, 124.83 mmol) in a mixture of EtOAc (460.00 mL) and sodium formate (353.17 g, 5.19 mol) dissolved in Water (1.84 L), and then [[(1R,2R)-2-amino-1,2-diphenyl-ethyl]-(p-tolylsulfonyl)amino]-chloro-ruthenium; 1-isopropyl-4-methyl-benzene (1.59 g, 2.50 mmol) was added. The resulting two-phase mixture was stirred for 12 h at 25° C. under N2. TLC showed the starting material was consumed. The mixture was extracted with EtOAc (50 mL*3). The combined organic was washed with brine (30 mL), dried over Na₂SO₄, filtered and concentrated to get the crude. The residue was purified by re-crystallization from Petroleum ether/Ethyl acetate=5:1 to give the compound 7-4-6B as a white solid (36.00 g, 77.83% yield) as a white solid. ¹H NMR (400 MHz, DMSO-d₆): δ=11.31 (s, 1H), 7.67 (s, 1H), 6.16 (dd, J=5.5, 8.8 Hz, 1H), 5.05 (d, J=5.1 Hz, 1H), 4.49 (br d, J=5.1 Hz, 1H), 3.78-3.70 (m, 1H), 3.55 (d, J=3.7 Hz, 1H), 2.20-2.09 (m, 1H), 1.96 (br dd, J=5.7, 13.0 Hz, 1H), 1.77 (s, 3H), 1.11 (d, J=6.4 Hz, 3H), 0.87 (s, 9H), 0.09 (s, 6H). HPLC: HPLC purity: 97.7%. SFC: SFC purity: 99.1%. TLC (Petroleum ether/Ethyl acetate=1:1) Rf=0.37.

### Preparation of Compound 7-4-7B

[chemical structure]

[1674] Compound 7-4-6B (18.00 g, 48.58 mmol) was dried by azeotropic distillation on a rotary evaporator with pyridine (100 mL) and toluene (100 mL*2). A solution of compound 7-4-6B (18.00 g, 48.58 mmol) and DMTCl (1.89 g, 5.59 mmol) in the mixture of pyridine (180.00 mL) and THF (720.00 mL) was degassed and purged with N₂ for 3 times and then AgNO₃ (14.19 g, 83.56 mmol) was added. The mixture was stirred at 25° C. for 15 hr. TLC showed the starting material was consumed. MeOH (5 mL) was added and stirred for 15 min and then the mixture was filtered and the cake was washed with toluene (300 mL*3). The filtrate was concentrated to obtain the compound 7-4-7B as a yellow oil (65.38 g, crude). The mixture was used directly to next step without any purification. TLC (Petroleum ether/Ethyl acetate) Rf=0.63.

### Preparation of 5′-(R)—C-Me-5′-DMTr-dT

[chemical structure]

[1676] To a solution of compound 7-4-7B (65.38 g, 97.16 mmol) in THF (650.00 mL) was added TBAF (1 M, 184.60 mL). The mixture was stirred at 25° C. for 12 hours. TLC showed the starting material was consumed. The mixture was concentrated to provide the crude and then sat. NaCl (5% aq., 200 mL*2) was added and the mixture was extracted with EtOAc (200 mL*3). The combined organic phase was dried over Na₂SO₄, filtered and concentrated to provide the crude product, which was purified by MPLC (Petroleum ether:Ethyl acetate 5:1,1:1,1:4,5% TEA) to provide 5′-(R)—C-Me-5′-DMTr-dT as a white solid (47.50 g, 85.03 mmol, 87.52% yield). ¹H NMR (400 MHz, DMSO-d₆): δ=11.32 (s, 1H), 7.46 (br d, J=7.8 Hz, 2H), 7.37-7.25 (m, 6H), 7.23-7.16 (m, 1H), 7.07 (s, 1H), 6.89 (dd, J=4.6, 8.5 Hz, 4H), 6.12 (t, J=7.2 Hz, 1H), 5.27 (d, J=4.6 Hz, 1H), 4.54-4.46 (m, 1H), 3.73 (d, J=1.8 Hz, 6H), 3.62 (t, J=2.9 Hz, 1H), 3.40-3.34 (m, 1H), 2.09-2.02 (m, 2H), 1.40 (s, 3H), 0.77 (d, J=6.2 Hz, 3H). ¹³C NMR (101 MHz, DMSO-d₆): δ=163.98, 158.58, 150.81, 146.95, 137.11, 136.79, 135.76, 130.49, 130.41, 128.20, 128.15, 127.04, 113.54, 113.52, 110.16, 89.87, 86.24, 83.35, 70.28, 70.05, 60.20, 55.47, 55.35, 21.20, 17.82, 14.52, 12.08. HPLC: HPLC purity: 98.7%. LC-MS: (M−H⁺)=557.2. LCMS purity: 98.9%. SFC: SFC purity: 100.0%. TLC (Petroleum ether/Ethyl acetate=1:1, 5% TEA) Rf=0.02.

### Preparation of 5′-(R)—C-Me-5′-DMT-dT-CNE-Amidite

[chemical structure]

[1678] 5′-(R)—C-Me-5′-OMT-dT (5 g, 8.95 mmol) was dried with toluene (50 mL). To a solution of DIEA (1.39 g, 10.74 mmol, 1.87 mL) and 5′-(R)—C-Me-5′-DMT-dT (5 g, 8.95 mmol) in anhydrous DCM (50 mL) was added compound 7-4-1 (2.76 g, 9.40 mmol) under N2 at 0° C. The mixture was stirred at 15° C. for 2 h. TLC showed the starting material was consumed and two new spots were found. The mixture was quenched by addition of saturated aq. NaHCO₃(20 mL) and extracted with DCM (30 mL*3). The combined organic phase was dried over Na₂SO₄, filtered and concentrated to provide the crude product, which was purified on a Combiflash instrument from Teledyne. A 40 g silica gel cartridge column was first pre-treated by eluting with 10% EtOAc/Petroleum ether containing 5% Et₃N (300 mL). The crude product was dissolved in a 2:1 volume:volume mixture of methylene chloride:petroleum ether containing 5% Et₃N and loaded onto the column. After loading, the purification process was run using the following gradient: 10 to 50% EtOAc/Petroleum ether containing 5% Et₃N. Fractions were collected. After evaporation of the solvent, 5′-(R)—C-Me-5′-DMT-dT-CNE-amidite was obtained as a white solid (3.6 g, 53% yield). ¹H NMR (400 MHz, CHLOROFORM-d) δ=8.11 (br s, 1H), 7.53 (br d, J=7.7 Hz, 3H), 7.42 (br t, J=8.2 Hz, 4H), 7.32-7.17 (m, 4H), 7.07-6.99 (m, 1H), 6.84 (br d, J=8.2 Hz, 4H), 6.31 (br dd, J=5.5, 8.7 Hz, 1H), 4.94 (br s, 1H), 3.96-3.73 (m, 10H), 3.72-3.41 (m, 4H), 2.65 (td, J=6.1, 18.0 Hz, 2H), 2.53-2.37 (m, 1H), 2.10 (br d, J=8.2 Hz, 1H), 1.47 (br s, 4H), 1.33-1.16 (m, 15H), 1.00-0.90 (m, 3H). ³¹P NMR (162 MHz, CHLOROFORM-d) δ=148.81 (s, 1P), 148.35 (s, 1P).

### Example 7-5. Synthesis of 5′-(S)—C-Me-5′-DMT-dT-CNE Amidite

[chemical structure]

[chemical structure]

### Preparation of Compound 7-5-2

[chemical structure]

[1681] To a solution of compound 7-5-1 (63.00 g, 176.72 mmol) in the mixture of H₂O (250.00 mL) and MeCN (250.00 mL) was added PhI(OAc)₂ (125.23 g, 388.79 mmol) and TEMPO (5.56 g, 35.34 mmol) at 10° C. The mixture was stirred at 25° C. for 2 hours. TLC (Petroleum ether/Ethyl acetate=1:1, Rf=0) showed the starting material was consumed. The mixture was concentrated, and MTBE (1 L) was added. The mixture was stirred for 0.5 h and then filtered. The cake was washed with MTBE (1 L*2), and dried to provide compound 7-5-2 as a white solid (126 g, 96.23% yield). ¹H NMR (400 MHz, DMSO): δ=11.21 (s, 1H), 7.89 (d, J=1.0 Hz, 1H), 6.18 (dd, J=5.9, 8.6 Hz, 1H), 4.61-4.41 (m, 1H), 4.17 (d, J=0.9 Hz, 1H), 2.51-2.26 (m, 3H), 2.09-1.85 (m, 2H), 1.74-1.58 (m, 3H), 0.90-0.58 (m, 10H), 0.00 (d, J=2.0 Hz, 6H). LC-MS: (M+H⁺): 371.1. TLC (Petroleum ether/Ethyl acetate=1:1) Rf=0.

### Preparation of Compound 7-5-3

[chemical structure]

[1683] To a solution of compound 7-5-2 (50.00 g, 134.96 mmol) in DCM (500.00 mL) was added DIEA (34.89 g, 269.92 mmol, 47.15 mL) and 2,2-dimethylpropanoyl chloride (21.16 g, 175.45 mmol). The mixture was stirred at −10-0° C. for 1.5 hours. TLC showed the starting material was consumed. The mixture in DCM was used directly for next step. TLC (Petroleum ether/Ethyl acetate=1:1) Rf=0.15.

### Preparation of Compound 7-5-4

[chemical structure]

[1685] To compound 7-5-3 in DCM was added TEA (40.94 g, 404.55 mmol, 56.08 mL) and N-methoxymethanamine hydrochloride (19.73 g, 202.27 mmol). The mixture was stirred at 0° C. for 1 h. TLC showed the starting material was consumed. The mixture was washed with HCl (1N, 100 mL) and then aqueous NaHCO₃(100 mL). The organic layer was dried over Na₂SO₄, filtered and concentrated to provide the crude product, which was purified by silica gel chromatography (Petroleum ether/Ethyl acetate=30/1, 0/1) to afford compound 7-5-4 as a white solid (95.5 g, 85.63% yield). ¹H NMR (400 MHz, CDCl₃): δ=8.29 (s, 1H), 8.19 (br s, 1H), 6.46 (dd, J=5.1, 9.3 Hz, 1H), 4.71 (s, 1H), 4.38 (d, J=4.2 Hz, 1H), 3.65 (s, 3H), 3.15 (s, 3H), 2.18-2.08 (m, 1H), 2.00-1.90 (m, 1H), 1.87 (d, J=1.1 Hz, 3H), 0.88-0.74 (m, 10H), 0.00 (d, J=3.7 Hz, 6H). TLC (Petroleum ether/Ethyl acetate=1:1) Rf=0.43.

### Preparation of Compound 7-5-5

[chemical structure]

[1687] To a solution of compound 7-5-4 (115.00 g, 278.09 mmol) in THF (1.20 L) was added MeMgBr (3 M, 185.39 mL) at 0° C. The mixture was stirred at 0° C. for 2 h. TLC showed the starting material was consumed. To the mixture was added water (1 L) at 0° C. and the mixture was extracted with EtOAc (300 mL*2). The combined organic phase was dried over Na₂SO₄, filtered and concentrated to provide the compound 7-5-5 as a white solid (100.00 g, 97.58% yield). The mixture was used directly without further purification. ¹H NMR (400 MHz, CDCl₃): δ=8.81 (br s, 1H), 7.95 (s, 1H), 6.41 (dd, J=5.6, 8.1 Hz, 1H), 4.60-4.40 (m, 2H), 2.40-2.16 (m, 4H), 1.98 (s, 3H), 1.02-0.83 (m, 10H), 0.14 (d, J=3.3 Hz, 6H), 0.20-0.00 (m, 1H). TLC (Petroleum ether/Ethyl acetate=1:1) Rf=0.68.

### Preparation of Compound 7-5-6A

[chemical structure]

[1689] To a solution of compound 7-5-5 (46.00 g, 124.83 mmol) in the mixture of EtOAc (460.00 mL) and sodium formate (353.17 g, 5.19 mol) dissolved in water (1.84 L), and N-[(1S,2S)-2-amino-1,2-diphenyl-ethyl]-4-methyl-benzenesulfonamide chlororuthenium; 1-isopropyl-4-methyl-benzene (1.59 g, 2.50 mmol) was added. The resulting two-phase mixture was stirred for 12 h at 25° C. under N2. TLC showed the starting material was consumed. The mixture was extracted with EtOAc (500 mL*3). The combined organic was washed with brine (300 mL), dried over Na₂SO₄, filtered and concentrated to provide the crude product. The mixture was purified by MPLC (Petroleum ether/MTBE=10:1 to 1:1) seven times to provide compound 7-5-6A as a yellow oil (25.6 g, 57.53% yield). ¹H NMR (400 MHz, DMSO-d₆): δ=11.28 (s, 1H), 7.85 (s, 1H), 6.16 (t, J=6.8 Hz, 1H), 5.04 (d, J=4.6 Hz, 1H), 4.46-4.29 (m, 1H), 3.79 (br t, J=6.8 Hz, 1H), 3.59 (br s, 1H), 3.32 (s, 1H), 2.21-2.09 (m, 1H), 2.06-1.97 (m, 1H), 1.76 (s, 3H), 1.17-1.08 (m, 4H), 0.91-0.81 (m, 10H), 0.08 (s, 6H). SFC: SFC purity: 98.6%. TLC (Petroleum ether/Ethyl acetate=1:1) Rf=0.38.

### Preparation of Compound 7-5-7A

[chemical structure]

[1691] Compound 7-5-6A (12.80 g, 34.55 mmol) was dried by azeotropic distillation on a rotary evaporator with pyridine (100 mL) and toluene (100 mL*2). To a solution of compound 7-5-6A (12.80 g, 34.55 mmol) and DMTCl (1.89 g, 5.59 mmol) in the mixture of pyridine (120.00 mL) and THF (400.00 mL) was degassed and purged with N₂ for 3 times and then AgNO₃ (10.09 g, 59.43 mmol) was added. The mixture was stirred at 25° C. for 15 hr. TLC showed the starting material was consumed. MeOH (5 mL) was added and stirred for 15 min and then the mixture was filtered and the cake was washed with toluene (300 mL*3). The filtrate was concentrated to get the compound 7-7-7A as a yellow oil (46.50 g, crude). The mixture was used directly to next step without any purification. TLC (Petroleum ether/Ethyl acetate) Rf=0.63.

### Preparation of 5′-(S)—C-Me-5′-DMT-dT

[chemical structure]

[1693] To a solution of compound 7-5-7A (46.50 g, 69.11 mmol) in THF (460.00 mL) was added TBAF (1 M, 131.31 mL). The mixture was stirred at 25° C. for 5 hrs. TLC showed the starting material was consumed. The mixture was concentrated and then sat. NaCl (5% aq., 200 mL) was added and the aqueous phase was extracted with EtOAc (200 mL*3). The combined organic layer was dried over Na₂SO₄, filtered and concentrated to provide the crude product, which was purified by MPLC (Petroleum ether/Ethyl acetate 5:1, 1:1, 1:4, 5% TEA) to provide 5′-(S)—C-Me-5′-DMT-dT as a white solid (29.0 g, 75.12% yield). ¹H NMR (400 MHz, DMSO-d₆): δ=11.35 (s, 1H), 7.56 (s, 1H), 7.58-7.53 (m, 1H), 7.44 (d, J=7.8 Hz, 2H), 7.37-7.24 (m, 6H), 7.23-7.17 (m, 1H), 6.87 (t, J=8.3 Hz, 4H), 6.13 (t, J=6.9 Hz, 1H), 5.21 (d, J=4.9 Hz, 1H), 4.23 (br s, 1H), 3.73 (d, J=2.9 Hz, 6H), 3.67 (t, J=3.7 Hz, 1H), 3.57-3.46 (m, 1H), 2.23-2.04 (m, 2H), 1.67 (s, 3H), 1.70-1.65 (m, 1H), 0.71 (d, J=6.2 Hz, 3H). ¹³CNMR (101 MHz, DMSO-d₆): δ=170.78, 164.16, 158.64, 158.59, 150.86, 146.71, 137.00, 136.75, 135.97, 130.65, 130.52, 128.38, 128.07, 127.11, 113.48, 110.11, 89.78, 86.41, 83.87, 70.58, 70.22, 60.21, 55.48, 21.20, 18.08, 14.53, 12.54. HPLC: HPLC purity: 98.4%. LCMS: (M−H+)=557.2; LCMS purity: 99.0%. SFC: SFC purity: 99.4%. TLC (Petroleum ether/Ethyl acetate=1:1, 5% TEA) Rf=0.01.

### Preparation of 5′-(S)—C-Me-5′-DMT-dT-CNE-Amidite

[chemical structure]

[1695] To a solution of 5′-(S)—C-Me-5′-DMT-dT (5.00 g, 8.95 mmol) in MeCN (50.00 mL) was added 5-ethylsulfanyl-2H-tetrazole (1.17 g, 8.95 mmol), 1-methylimidazole (1.47 g, 17.90 mmol, 1.43 mL) and compound 7-5-1 (4.05 g, 13.43 mmol, 4.26 mL). The reaction mixture was stirred at 20° C. under N2 for 2 hrs. TLC and LC-MS showed some starting material was consumed and the desired substance was formed. The reaction mixture was concentrated under reduced pressure, and the residue was diluted with EtOAc (20 mL). The reaction mixture was washed with aq. saturated NaHCO₃ solution (20 mL), dried over Na₂SO₄, filtered and concentrated to provide the crude product, which was purified by MPLC (Petroleum ether 5% TEA: Ethyl acetate from 10:1 to 1:1) to provide 5′-(S)—C-Me-5′-DMT-dT-CNE-amidite as a white solid (4.3 g, 63.31% yield). ¹H NMR (400 MHz, CHLOROFORM-d) δ=8.19 (br s, 1H), 7.69-7.60 (m, 1H), 7.54 (s, 1H), 7.43-7.33 (m, 2H), 7.32-7.07 (m, 8H), 6.73 (ddd, J=3.7, 5.8, 9.0 Hz, 4H), 6.27-6.15 (m, 1H), 4.49-4.37 (m, 1H), 3.82-3.65 (m, 8H), 3.63-3.55 (m, 2H), 3.53-3.39 (m, 3H), 2.50 (t, J=6.3 Hz, 1H), 2.46-2.31 (m, 1H), 2.29-2.19 (m, 1H), 2.16-2.04 (m, 1H), 1.68 (s, 3H), 1.20-1.00 (m, 13H), 0.95 (d, J=6.8 Hz, 3H), 0.92-0.74 (m, 4H). ³¹P NMR (162 MHz, CHLOROFORM-d) δ=149.11 (s, 1P), 148.99 (s, 1P).

### Example 7-6. Synthesis of L-DPSE-5′-(R)—C-Me-5′-DMT-dT Amidite

[chemical structure]

[1697] The 5′-(R)—C-Me-5′-OMT-dT (11.17 g, 20 mmol) was dried two times by co-evaporation with 80 mL of anhydrous toluene at 45° C. and kept at high vacuum for overnight. Then the dried 5′-(R)—C-Me-5′-OMT-dT was dissolved in dry THF (80 mL) in 500 mL three neck flasks under argon, followed by the addition of triethylamine (13.93 mL, 100 mmol) and the mixture was cooled to −40° C. To this cooled reaction mixture was added the solution of the crude L-DPSE-NOPCl (30 mmol, 1.4 eq, in THF 40 mL), from a stock through syringe dropwise (˜15 min, maintaining the internal temperature −40- to −35° C.). The mixture was then gradually warmed to 5° C. After 30 min at 5° C., TLC and LC-MS analysis indicated the complete conversion of SM to product (total reaction time 2 h). The reaction mixture was cooled in an ice bath and the reaction quenched by addition of water (0.36 mL, 20 mmol). The mixture was stirred for 10 min followed by addition of anhydrous Mg₂SO₄ (3.0 g, 20 mmol). The reaction was filtered through Airfree, Schlenk filter tube, washed with dry THF (60 mL) and the solvent was evaporated under rotary evaporation at 28° C. to afford the crude product as a off-white solid which was dried under high vacuum for overnight. The dried crude product was purified by Combi-Flash Rf (Teledyne ISCO) using a 220 silica column (which was pre-deactivated with 3 column volume of ethyl acetate with 5% TEA) with ethyl acetate/hexane mixture contains 5% TEA as a solvent. Fractions were analyzed by TLC and LC-MS and pooled together. Solvent was evaporated in a rotary evaporator at 28° C. and the residue was dried under high vacuum to afford the product as a white solid. Yield: 16.3 g (91%). ¹H NMR (400 MHz, Chloroform-d) δ 7.50-7.36 (m, 6H), 7.35-7.06 (m, 13H), 6.85 (d, J=1.4 Hz, 1H), 6.73 (dq, J=8.7, 3.2 Hz, 4H), 6.13 (dd, J=9.3, 5.3 Hz, 1H), 5.10 (td, J=7.8, 7.1, 3.4 Hz, 1H), 4.80 (dt, J=8.6, 5.8 Hz, 1H), 4.04 (q, J=7.1 Hz, 1H), 3.69 (d, J=2.3 Hz, 6H), 3.57-3.36 (m, 3H), 3.29-3.05 (m, 2H), 2.05 (dd, J=13.6, 5.5 Hz, 1H), 1.96 (s, 2H), 1.73-1.50 (m, 3H), 1.47-1.32 (m, 2H), 1.30 (d, J=1.2 Hz, 3H), 1.17 (t, J=7.2 Hz, 2H), 0.75 (d, J=6.5 Hz, 3H), 0.60 (s, 3H). ³¹P NMR (162 MHz, CDCl₃) δ 151.34 (s). MS: LCMS: Calculated, C51H56N3O8 PSi, 897.3574; Observed +Ve mode: m/z: 898.52 [M+H]; 999.95 [M+Et₃N]. ¹³C NMR (101 MHz, CDCl₃) δ 171.12, 163.83, 158.65, 158.61, 150.21, 146.50, 136.96, 136.71, 136.59, 135.94, 135.54, 134.60, 134.34, 130.24, 130.15, 129.45, 129.39, 128.02, 127.96, 127.94, 127.88, 127.79, 126.86, 113.17, 113.11, 110.93, 89.27, 89.25, 86.48, 83.68, 79.09, 78.99, 77.42, 77.30, 77.10, 76.78, 71.78, 71.70, 70.26, 68.39, 68.36, 60.39, 55.24, 47.19, 46.83, 46.09, 39.48, 39.44, 27.35, 25.97, 25.93, 21.05, 18.33, 17.85, 17.81, 14.23, 11.73, 11.45.

### Example 7-7. Synthesis of L-DPSE-5′-(S)—C-Me-5′-DMT-dT Amidite

[chemical structure]

[1699] 5′-(S)—C-Me-5′-OMT-dT (1.20 g, 2 mmol) was dried two times by co-evaporation with 20 mL of anhydrous toluene at 45° C. and kept at high vacuum for overnight. Then the dried 5′-(S)—C-Me-5′-OMT-dT was dissolved in dry THF (20 mL) in a 100 mL three neck flasks under argon, followed by the addition of triethylamine (1.4 mL, 10 mmol) and the mixture was cooled to −40° C. To this cooled reaction mixture was added the solution of the crude L-DPSE-NOPCl (3 mmol, 1.5 eq, in THF 3.0 mL) from a stock was through syringe dropwise ˜5 min (maintaining the internal temperature −40° C., then gradually warmed to 5° C.). After 30 min at 5° C., TLC and LC-MS analysis indicated complete conversion of SM to product (total reaction time 1.5 h). The reaction mixture was cooled in an ice bath and the reaction was quenched by addition of water (0.036 mL, 2 mmol). The mixture was stirred for 10 min, followed by addition of anhydrous MgSO₄ (0.3 g, 2 mmol). The reaction was filtered through Airfree, Schlenk filter tube and washed with dry THF (20 mL). The solvent was evaporated under rotary evaporation at 28° C. to provide the off-white solid which was dried under high vacuum for overnight. The dried crude product was purified by Combi-Flash Rf (Teledyne ISCO) using 40 g silica column (which was pre-deactivated with 3 column volume of ethyl acetate with 5% TEA) with ethyl acetate/hexane mixture containing 5% TEA as a solvent. After column purification, fractions were analyzed by TLC and LC-MS and were pooled together and evaporated in a rotary evaporator at 28° C. The residue was dried under high vacuum to afford L-DPSE-5′-(S)—C-Me-5′-DMT-dT amidite as a white solid. Yield: 1.27 g (70%). ³¹P NMR (162 MHz, CDCl₃) δ 149.73 (s). MS: LC-MS; Calculated: C₅₁H56N3O8 PSi, 897.3574; Observed +Ve mode: m/z: 898.56[M+H].

### Example 7-8. Synthesis of L-DPSE-5′-DMT-5-C₆-aminolinker Amidite—Incorporation of Desired Moieties Through Nucleobases

[chemical structure]

[1701] The 5′-DMT-5-C₆ aminoTFA-dT (25 g, 31.5 mmol, from Berry& Associates Inc) was dried two times by co-evaporation with 100 mL of anhydrous toluene at 45° C. and kept at high vacuum for overnight. Then the dried material was dissolved in dry THF (100 mL) in 500 mL three neck flasks under argon, followed by the addition of triethylamine (21.92 mL, 157 mmol) and then was cooled to −70° C. To this cooled reaction mixture was added a solution of the crude L-DPSE-NOPCl (44 mmol, 1.4 eq, in THF 44 mL), from a stock via syringe dropwise (˜15 min, maintaining the internal temperature −60- to 50° C.). The mixture was gradually warmed to 5° C. After 30 min at 5° C., TLC and LC-MS analysis indicated complete conversion of SM to product (total reaction time 2 h). The reaction mixture was cooled in an ice bath and quenched by addition of water (0.56 mL, 31.5 mmol), and stirred for 10 min followed by added anhydrous Mg₂SO₄ (3.8 g, 31.5 mmol). The reaction was filtered through Airfree, Schlenk filter tube, washed with dry THF (80 mL), and evaporated under rotary evaporation at 28° C. to afford the crude product as off-white solid, which was dried under high vacuum for overnight. The dried crude product was purified by Combi-Flash Rf (Teledyne ISCO) using 220 silica column (which was pre-deactivated with 3 column volume of ethyl acetate with 5% TEA) with ethyl acetate/hexane mixture contains 5% TEA as a solvent. After column purification fractions were analyzed by TLC and LC-MS, and pooled together. Solvent was evaporated in a rotary evaporator at 28° C. and the residue was dried under high vacuum to afford the product as a white solid. Yield: 30 g (88%). MS: LC-MS; Calculated: C60H67F3N5O10 PSi, 1133.4347; Observed in +Ve mode: 1235.55 (M+Et₃N). ¹H NMR (400 MHz, Chloroform-d) δ 7.78 (s, 1H), 7.40 (ddd, J=9.8, 6.5, 2.2 Hz, 5H), 7.32 (d, J=7.3 Hz, 2H), 7.30-7.09 (m, 15H), 6.99 (d, J=15.5 Hz, 1H), 6.76 (dd, J=8.9, 2.7 Hz, 4H), 6.54 (d, J=15.5 Hz, 1H), 5.12 (t, J=6.1 Hz, 1H), 4.66-4.49 (m, 2H), 4.04 (q, J=7.1 Hz, 1H), 3.81 (q, J=3.0 Hz, 1H), 3.67 (s, 6H), 3.41 (ddt, J=14.8, 10.2, 7.7 Hz, 1H), 3.30-3.13 (m, 4H), 3.12-2.91 (m, 4H), 1.96 (s, 2H), 1.92-1.69 (m, 2H), 1.58 (ddt, J=15.1, 11.6, 8.0 Hz, 1H), 1.50-1.29 (m, 5H), 1.18 (tq, J=15.8, 8.8, 8.0 Hz, 9H), 0.52 (s, 3H). ³¹P NMR (162 MHz, CDCl₃) δ 150.88 (s). ¹³C NMR (101 MHz, CDCl₃) δ 171.18, 165.77, 161.89, 158.76, 158.74, 157.85, 157.49, 157.12, 156.76, 149.17, 144.52, 139.69, 136.68, 135.86, 135.53, 135.44, 134.54, 134.30, 131.15, 129.97, 129.89, 129.44, 129.38, 128.09, 127.93, 127.91, 127.18, 122.36, 120.31, 117.44, 114.58, 113.42, 113.39, 111.72, 110.53, 86.65, 86.04, 86.02, 85.67, 79.28, 79.19, 77.42, 77.31, 77.11, 76.79, 73.20, 73.12, 68.05, 68.02, 63.09, 60.41, 55.27, 46.96, 46.60, 45.81, 40.48, 39.56, 38.88, 29.33, 28.52, 27.23, 25.83, 21.04, 17.55, 17.52, 14.20.

### Example 7-9. Synthesis of 5-Alkynyl thioacetate-5′-DMT-3′CNE-2′OMe-U Amidite

[chemical structure]

[1703] Compound 7-9-1 (5.0 g, 6.72 mmol) was co-evaporated with anhydrous toluene two times (40 mL×2) and dried under high vacuum for overnight. The dried yellow solid was dissolved in anhydrous THF (14 ml,-0.5 mmol/mL) under argon and to the solution was added 5-ethylthio-1H-tetrazole (1.05 g, 8.07 mmol), N-methylimidazole (0.045 g, 0.044 mL, 0.67 mmol) followed by 2-cynoethyl-N,N,N′,N′-tetraisopropylphosphordiamidite (2.23 g, 2.34 mL, 7.39 mmol). The reaction mixture was stirred at room temperature under argon for 5 h. TLC (solvent system: 40% CH₃CN/EtOAC/5% TEA) which was pre-equilibrated with the above solvent system indicated the completion of reaction at 5 h, which was also confirmed with LC-MS. The reaction mixture was diluted with EtOAc (100 mL) and the solution was transferred to separating funnel, washed with aq. saturated. NaHCO₃ solution (40 mL) and dried over anhydrous Mg₂SO₄. The dried solution was evaporated under rotary evaporation at bath temperature 28° C. to afford the crude product as off-yellow solid which was further dried under high vacuum for overnight. The dried crude product was purified in Combi-Flash Rf (Teledyne ISCO) using 80 g flash silica column, which was pre-deactivated with 2 column volume (CV 125 mL, 60 mL/min), of ethyl acetate with 5% TEA, followed by equilibration with 20% EtOAc/Hexane for 2 column volume. The compound was purified using Hexane/EtOAc/CH₃CN mixture containing 5% TEA as a solvent system. After purification column fractions were analyzed by TLC and LC-MS. Desired fractions were pooled together and evaporated in a rotary evaporator at 28° C. and was dried under high vacuum afforded 7-9-2-CNE amidite as white solid. Yield: 4.8 g (76%). MS: LC-MS; Calculated: C48H58N5O11PS, 943.35; Observed in +Ve mode: m/z 1045.92 (M+Et₃N). ¹H NMR (400 MHz, Chloroform-d) δ 8.36-8.07 (m, 1H), 7.47-7.09 (m, 10H), 6.78 (dt, J=9.1, 3.8 Hz, 4H), 5.87 (dd, J=26.6, 3.1 Hz, 1H), 4.73 (d, J=14.9 Hz, 1H), 4.57-4.30 (m, 1H), 4.21-4.00 (m, 2H), 3.86-3.32 (m, 17H), 3.23 (ddd, J=13.0, 11.2, 2.5 Hz, 1H), 2.91 (td, J=7.0, 2.4 Hz, 2H), 2.54 (q, J=6.1 Hz, 1H), 2.27 (d, J=24.2 Hz, 4H), 1.96 (d, J=7.1 Hz, 3H), 1.21-0.82 (m, 14H). ³¹P NMR (162 MHz, CDCl₃) δ 150.60 (s), 150.24(s). ¹³C NMR (101 MHz, CDCl₃) δ 195.80, 169.61, 161.45, 158.70, 158.68, 149.06, 144.75, 144.61, 142.82, 135.67, 135.58, 135.48, 135.38, 130.18, 130.16, 130.12, 128.14, 128.11, 128.09, 128.02, 127.01, 117.69, 117.53, 113.42, 113.38, 113.34, 99.60, 99.33, 88.98, 88.95, 88.50, 88.06, 87.06, 86.85, 83.89, 82.99, 82.62, 77.34, 77.22, 77.02, 76.70, 74.55, 74.40, 69.74, 69.62, 62.04, 61.26, 60.38, 58.97, 58.59, 58.47, 58.45, 57.89, 57.68, 55.34, 55.31, 43.33, 43.21, 35.44, 35.41, 30.54, 29.95, 24.71, 24.65, 24.63, 24.58, 24.56, 24.49, 21.04, 20.50, 20.43, 20.38, 20.31, 14.20.

[1704] As readily appreciated by those skilled in the art, compound 7-9-2 can be utilized in oligonucleotide synthesis as a phosphoramidite in accordance with the present disclosure, thereby incorporating a protected thiol group into oligonucleotides. After deprotection, free thiol groups can be utilized to link oligonucleotide monomers to form multimers, by forming one or more disulfide bonds, in accordance with the present disclosure.

[1705] As appreciated by a person having ordinary skill in the art, many technologies (e.g., chemistry, reagents, linkers, methods, etc.) can be utilized to prepare oligonucleotides (including those with various 5′-end structures) and to incorporate various chemical moieties, e.g., carbohydrate moieties, lipid moieties, targeting moieties, etc., into oligonucleotides in accordance with the present disclosure, for example but not limited to those described in WO/2010/064146, WO/2011/005761, WO/2013/012758, WO/2014/010250, US2013/0178612, WO/2014/012081, WO/2015/107425, WO/2017/015555, and WO/2017/062862. Described herein are example technologies for preparing oligonucleotides, including those comprising various moieties.

### Example 8. Preparation of WV-2652

[1706] To the corresponding oligonucleotide (5′-T*fA*mGfC*mUfU*mCfU*mUfG*mUfC*mCfA*mG*fC*mU*fU*mU*mUmU-3′ (SEQ ID NO: 1943)) attached to CPG (120 mg, 71 umol/g loading), 1 M diphenyl phosphite in dry pyridine (5 mL) was added then mixed at rt for 30 min. The support was washed with dry ACN (5 mL×3), followed by drying under vacuum. The dried support was then treated with pyridine-H₂O (1:1, v/v) (5 mL) with syringe and mixed at rt for 2 h, followed by washing with dry ACN (5 mL×5) and drying under vacuum. Aliquot of CPG (1 umol, 14.1 mg) was treated with AMA (400 uL) at 35° C. for 2 h. The mixture was isolated by IEX-purification to give WV-2652 (MW: 6968.9; MS Obs. 6966.7).

### Example 9. Preparation of WV-2653

[1707] To the corresponding oligonucleotide (5′-T*fA*mGfC*mUfU*mCfU*mUfG*mUfC*mCfA*mG*fC*mU*fU*mU*mUmU-3′ (SEQ ID NO: 1944)) attached to CPG (120 mg, 71 umol/g loading), 1 M diphenyl phosphite in dry pyridine (5 mL) was added then mixed at rt for 30 min. The support was washed with dry ACN (5 mL×3), followed by drying under vacuum. The dried support was then treated with pyridine-H₂O (1:1, v/v) (5 mL) with syringe and mixed at rt for 2 h, followed by washing with dry ACN (5 mL×5) and drying under vacuum. Aliquot of CPG (1 umol, 14.1 mg) was treated with 0.15 M 3-Phenyl-1,2,4-dithiazoline-5-one in BSA-ACN (1:9, v/v) for 1 h. The support was mixed with AMA (400 uL) at 35° C. for 2 h. The mixture was isolated by IEX-purification to give WV-2653 (MW: 7000.9; MS Obs. 6997.3).

### Example 10. Preparation of WV-2654

[1708] The corresponding oligonucleotide (5′-T*fA*mGfC*mUfU*mCfU*mUfG*mUfC*mCfA*mG*fC*mU*fU*mU*mUmU-3′(SEQ ID NO: 1945)) attached to CPG (1 umol, 14.1 mg) was treated with 0.1 M n-Pr phosphoramidite (Phosphoramidous acid, N,N-bis(1-methylethyl)-, propyl 2-cyanoethyl ester) and 0.5 M ETT in ACN for 15 min, followed by the treatment with 1.1 M TBHP in decan-DCM (1:4, v/v) for 15 min. The support was mixed with AMA (400 uL) at 35° C. for 2 h. The mixture was isolated by IEX-purification to give WV-2654 (MW: 7026.9; MS Obs. 7022.0).

### Example 11. Preparation of WV-2655

[1709] The corresponding oligonucleotide (5′-T*fA*mGfC*mUfU*mCfU*mUfG*mUfC*mCfA*mG*fC*mU*fU*mU*mUmU-3′ (SEQ ID NO: 1946)) attached to CPG (1 umol, 14.1 mg) was treated with 0.1 M n-Pr phosphoramidite (Phosphoramidous acid, N,N-bis(1-methylethyl)-, propyl 2-cyanoethyl ester) and 0.5 M ETT in ACN for 15 min, followed by the treatment with 0.15 M 3-Phenyl-1,2,4-dithiazoline-5-one in ACN for 15 min. The support was mixed with AMA (400 uL) at 35° C. for 2 h. The mixture was isolated by IEX-purification to give WV-2655 (MW: 7043.0; Obs. 7040.9).

### Example 12. Preparation of WV-2656

[1710] To the corresponding oligonucleotide (5′-fA*mGfC*mUfU*mCfU*mUfG*mU fC*mCfA*mG*fC*mU*fU*mU*mUmU-3′ (SEQ ID NO: 1947)) attached to CPG (120 mg, 71 umol/g loading), 0.1 M Dimethyl C3 phosphoroamidite (Phosphoramidous acid, N,N-bis(1-methylethyl)-, 3-[bis(4-methoxyphenyl)phenylmethoxy]-2,2-dimethylpropyl 2-cyanoethyl ester) and 0.5 M ETT in dry ACN (5 mL) was added and mixed at rt for 15 min. The support was washed with dry ACN (5 mL×3). To the support, 0.1 M 1,2,4-dithiazole-5-thione in dry pyridine (5 mL) was added then mixed at rt for 15 min. The support was washed with dry ACN (5 mL×3). To the support, 3% TCA in DCM (5 mL) was added in continuous flow at rt for 2 min. The support was washed with dry ACN (5 mL×3). To the aliquot of CPG (2 umol, 28.1 mg), 1 M diphenyl phosphite in dry pyridine (1 mL) was added then mixed at rt for 30 min. The support was washed with dry ACN (2 mL×3), followed by drying under vacuum. The dried support was then treated with pyridine-H₂O (1:1, v/v) (1 mL) with syringe and mixed at rt for 2 h, followed by washing with dry ACN (5 mL×5) and drying under vacuum. The support was mixed with AMA (400 uL) at 35° C. for 2 h. The mixture was isolated by IEX-purification to give WV-2656 (MW: 6830.8; MS Obs. 6831.1).

### Example 13. Preparation of WV-2657

[1711] To the corresponding oligonucleotide (5′-fA*mGfC*mUfU*mCfU*mUfG*mU fC*mCfA*mG*fC*mU*fU*mU*mUmU-3′ (SEQ ID NO: 1948)) attached to CPG (120 mg, 71 umol/g loading), 0.1 M Dimethyl C3 phosphoroamidite (Phosphoramidous acid, N,N-bis(1-methylethyl)-, 3-[bis(4-methoxyphenyl)phenylmethoxy]-2,2-dimethylpropyl 2-cyanoethyl ester) and 0.5 M ETT in dry ACN (5 mL) was added and mixed at rt for 15 min. The support was washed with dry ACN (5 mL×3). To the support, 0.1 M 1,2,4-dithiazole-5-thione in dry pyridine (5 mL) was added then mixed at rt for 15 min. The support was washed with dry ACN (5 mL×3). To the support, 3% TCA in DCM (5 mL) was added in continuous flow at rt for 2 min. The support was washed with dry ACN (5 mL×3). To the aliquot of CPG (2 umol, 28.1 mg), 1 M diphenyl phosphite in dry pyridine (1 mL) was added then mixed at rt for 30 min. The support was washed with dry ACN (2 mL×3), followed by drying under vacuum. The dried support was then treated with pyridine-H₂O (1:1, v/v) (1 mL) with syringe and mixed at rt for 2 h, followed by washing with dry ACN (5 mL×5) and drying under vacuum. The support was treated with 0.15 M (1S)-(+)-(10—Camphorsulfonyl)-oxaziridine in BSA-ACN (1:9, v/v) for 1 h. The support was mixed with AMA (400 uL) at 35° C. for 2 h. The mixture was isolated by IEX-purification to give WV-2657 (MW: 6846.8; MS Obs. 6844.7).

### Example 14. Preparation of WV-2658

[1712] To the corresponding oligonucleotide (5′-fA*mGfC*mUfU*mCfU*mUfG*mUfC*mCfA*mG*fC*mU*fU*mU*mUmU-3′ (SEQ ID NO: 1949)) attached to CPG (120 mg, 71 umol/g loading), 0.1 M Dimethyl C3 phosphoroamidite (Phosphoramidous acid, N,N-bis(1-methylethyl)-, 3-[bis(4-methoxyphenyl)phenylmethoxy]-2,2-dimethylpropyl 2-cyanoethyl ester) and 0.5 M ETT in dry ACN (5 mL) was added and mixed at rt for 15 min. The support was washed with dry ACN (5 mL×3). To the support, 0.1 M 1,2,4-dithiazole-5-thione in dry pyridine (5 mL) was added then mixed at rt for 15 min. The support was washed with dry ACN (5 mL×3). To the support, 3% TCA in DCM (5 mL) was added in continuous flow at rt for 2 min. The support was washed with dry ACN (5 mL×3). To the aliquot of CPG (2 umol, 28.1 mg), 1 M diphenyl phosphite in dry pyridine (1 mL) was added then mixed at rt for 30 min. The support was washed with dry ACN (2 mL×3), followed by drying under vacuum. The dried support was then treated with pyridine-H₂O (1:1, v/v) (1 mL) with syringe and mixed at rt for 2 h, followed by washing with dry ACN (5 mL×5) and drying under vacuum. The support was treated with 0.15 M 3-Phenyl-1,2,4-dithiazoline-5-one in BSA-ACN (1:9, v/v) for 15 min. The support was mixed with AMA (400 uL) at 35° C. for 2 h. The mixture was isolated by IEX-purification to give WV-2658 (MW 6862.9; MS Obs. 6860.7).

### Example 15. Preparation of WV-3122

[1713] Oligonucleotide WV-3122 was synthesized at a scale of 50 umol using standard cyanoethyl phosphoramidite chemistry up through the final T base and was left on CPG support with the DMT protecting group on (5′-T*fG*mUfC*mCfA*mGfC*mUfU*mUfA*mUfU*mG fGmGfAmG*T*mU-3′ (SEQ ID NO: 1950)). The final phosphate (PO) was then added to the 5′ end of the oligonucleotide on the synthesizer. Briefly, the DMT protecting group was removed using 3% trichloroacetic acid in dichloromethane. During the coupling step, equal volumes of bis-cyanoethyl-N,N-diisopropyl CED phosphoramidite (0.1M in acetonitrile, ChemGenes Corporation catalog No. CLP-1454) and 5-ethylthio tetrazole (0.5M in acetonitrile) were added with a contact time of 5 min. The coupling step was repeated. Oxidation was performed using 0.02M iodine in tetrahydrofuran/pyridine/water. The oligonucleotide was deprotected by first washing with 20% diethylamine in acetonitrile on support for 15 minutes. The support was washed with acetonitrile and dried. The oligonucleotide was then cleaved and further deprotected using ammonium hydroxide/ethanol (3:1 v/v) at 50° C. overnight. Target Mass 7062.0; Observed 7062.4.

### Example 16. Preparation of WV-7645

[1714] Oligonucleotide WV-7645 was synthesized at a scale of 50 umol using standard cyanoethyl phosphoramidite chemistry up to the penultimate base (fG)and was left on CPG support with the DMT protecting group on (5′-fG*mUfC*mCfA*mGfC*mUfU*mUfA*mUfU*mG*fG*mG*fA*mG*fG*mC*T*mU-3′ (SEQ ID NO: 1951)). The final base (5MRdT) was then added to the 5′ end of the oligonucleotide on the synthesizer using standard coupling conditions. Briefly, the DMT protecting group was removed using 3% trichloroacetic acid in dichloromethane. During the coupling step, equal volumes of 5′-(R)—C-Me-S′-DMT-dT-CNE phosphoramidite (0.1 M in acetonitrile) and 5-ethylthio tetrazole (0.5 M in acetonitrile) were added with a contact time of 5 min. The coupling step was repeated. Sulfurization was performed using 0.1M DDTT in pyridine. The final phosphate (PO) was then added to the 5′ end of the oligo on the synthesizer. The DMT protecting group was removed using 3% trichloroacetic acid in dichloromethane. During the coupling step, equal volumes of bis-cyanoethyl-N,N-diisopropyl CED phosphoramidite (0.1 M in acetonitrile, ChemGenes Corporation catalog No. CLP-1454) and 5-ethylthio tetrazole (0.5 M in acetonitrile) were added with a contact time of 5 min. The coupling step was repeated. Oxidation was performed using 0.02 M iodine in tetrahydrofuran/pyridine/water. The oligonucleotide was deprotected by first washing with 20% diethylamine in acetonitrile on support for 10 minutes. The support was washed with acetonitrile and dried. The oligonucleotide was then cleaved and further deprotected using ammonium hydroxide at 40° C. overnight, giving ca. 31 mg crude at 68% purity. The crude product was further purified to provide the final product. MW: 7839.6. MS Observed: 7838.6.

### Example 17. Example Procedure for Incorporation of Amino Linker

[1715] Oligonucleotide WV-3973 was synthesized at a scale of 50 umol using standard cyanoethyl phosphoramidite chemistry up through the final Aeo base leaving the DMT protecting group on (5′-Aeo*Geo*m5Ceo*Teo*Teo*C*T*T*G*T*C*C*A*G*C*Teo*Teo*Teo*Aeo*Teo-3′ (SEQ ID NO: 1952)). The amine linker was then added to the 5′ end of the oligo on the synthesizer. Briefly, the DMT protecting group was removed using 3% trichloroacetic acid in dichloromethane. During the coupling step, equal volumes of TFA-amino C₆ CED phosphoramidite (0.15M, ChemGenes Corporation catalog no. CLP-1553 or Glen Research catalog no. 10-1916) and 5-ethylthio tetrazole (0.5M in acetonitrile) were added with a contact time of 5 min. The coupling step was repeated. Oxidation was performed using 0.02M iodine in tetrahydrofuran/pyridine/water. The oligonucleotide was deprotected by first washing with 20% diethylamine in acetonitrile on support for 15 minutes. The support was washed with acetonitrile and dried. The oligo was then cleaved and further deprotected using ammonium hydroxide at 50° C. overnight. Target Mass: 7288.0. Observed: 7286.3.

### Example 18. Example Procedure for Incorporation of Carbohydrate Moieties in Solution Phase—Preparation of WV-5287

[1716] A solution of a carbohydrate-containing carboxylic acid compound (2 equivalent), HATU (1.8 equivalent) and diisopropylethylamine (8 equivalent) in dry acetonitrile (or dry DMF) was vortexed for 2 minutes. To this solution was added a solution of oligonucleotide (1 equivalent) in water. Reaction mixture was vortexed for 2 minutes and kept for 60 minutes. By this time the reaction typically went to completion. The solvent was removed under vacuum and diluted with water appropriately and purified by RP column chromatography or IEX chromatography. In case carbohydrate (e.g., GalNAc) moieties were protected as acetates, NH3 treatment was performed before purification. An example is described below.

### Preparation of WV-5287—Example Incorporation of Carbohydrate Moieties by Conjugation with WV-2422

[1717] A solution of a carboxylic acid containing three carbohydrate moieties (see scheme below, 17 mg, 10.8 umol), HATU (3.7 mg, 9.72 umol), and DIPEA (8 ul, 43.2 umol) was thoroughly vortexed for 2 minutes in 3 mL dry DMF. To this solution was added WV-2422 (40.6 mg, 5.4 umol) in 1.5 mL water and the mixture was shaken for 60 minutes. Completion of the reaction was monitored by LC-MS (˜1 hour). After the reaction was complete, solvent was removed under reduced pressure and the crude product was purified by IEX. Molecular weight calculated: 8961. Deconvoluted Mass: 8962.

[chemical structure]

### Example 19. Example Procedure for Incorporation of Carbohydrate Moieties in Solution Phase—Preparation of WV-3969

[1718] A solution of a carboxylic acid containing GalNac moieties (38 mg, 20 umol), HATU (7 mg, 17.9 umol), and DIPEA (15 ul, 80 umol) was thoroughly vortexed for 2 minutes in 4 ml dry AcCN. To this solution was added WV-2422 (50 mg, 6.7 umol) in 2 ml water and the mixture was shaken for 60 minutes. Completion of the reaction was monitored by LC-MS (˜1 hour). After the reaction was complete, solvent was removed under reduced pressure. The crude product was dissolved in 30% ammonia solution and heated at 50° C. for three hours and the solvent was removed under vacuum. Crude product obtained was purified by IEX. Molecular weight calculated: 9025. Deconvoluted Mass: 9024.

[chemical structure]

### Example 20. Preparation of WV-8095

[1719] Synthesis of WV-8095 was performed iteratively on an ÄKTA OP100 synthesizer (GE healthcare) using a 12-mL stainless steel column reactor on a 250 umol scale using NittoPhase HL (Loading 190 umol/g, Kinovate Life Sciences). During synthesis, chain elongation consisted of four steps namely detritylation, coupling, oxidation/thiolation and capping. Detritylation was performed using 3% DCA in toluene with a UV watch command set at 436 nm. Following detritylation, 4 CV of ACN was used to wash off the detritylation reagent. Coupling was performed using 0.175 M amidite solutions in ACN and 0.6M CMIMT in ACN for stereo-defined monomers and 0.6 M ETT for standard amidites. All phosphoramidite and ETT solutions were prepared and dried over 3A molecular sieves for at least 3 hours prior to synthesis. The CMIMT solution was dried over Trap Pak sieves (Bioautomation) for 90 minutes prior to use. Coupling was performed by mixing 40% (by volume) of amidite solution with 60% of the activator in-line prior to addition to the column. The coupling mixture was then recirculated for a minimum of 8 minutes to enhance the coupling efficiency. Following coupling, the column was washed with no less than 2CV of ACN. The column was then treated with Capping B solution (acetic anhydride, lutidine, ACN) mixture for 2 CV to acetylate the chiral axillary amine for stereo-defined couplings. Following this step the column was washed with ACN for at least 2 CV. Thiolation was then performed with 0.1 M POS in ACN with a contact time of 6 min for 2 CV. After a 2 CV thio wash step using ACN, capping was performed using 0.5 CV of Capping A (20% N-methylimidazole in Acetonitrile (ACN)) and Capping B reagents mixed inline (1:1) followed by a 2 CV ACN wash. For cycles to form natural phosphate linkages, oxidation was performed using 1.1 M TBHP solution (in DCM and decane) for 2 min and 77 equivalents.

[1720] Cleavage and Deprotection of WV-8095: The DPSE auxiliary on WV-8095 were removed by treating the oligonucleotide bound solid support with a 1M solution of TEA.HF made by mixing TEA.3HF, TEA, DMF, and water in a v/v ratio of 10:9:61:20. The mixture was then heated at 50° C. for 90 min. The mixture was cooled (ice bath) and then filtered (10 micron). The cake was washed with ACN and water and dried under vacuum. The dry cake was then taken up in ammonia: methylamine mixture (1:1, 20 mL) and the mixture shaken at room temperature for 3.0 hrs. The mixture was then filtered (10 micron) and the cake washed with water (3×20 mL). The filtrate liquor was obtained and analyzed by UPLC and a purity of 23.69% FLP found. The mixture was then neutralized with acetic acid to a pH value 6.1. Quantitation was done using a Nano Drop one spectrophotometer (Thermo Scientific) and a yield of about 21,000 ODs obtained.

[1721] Purification of WV-8095: The crude WV-8095 was desalted on a 2K generated cellulose membrane until the conductivity was ≤3 mScm⁻¹. The desalted material (142 mL) was then diluted with 20 mM NaOH to 250 mL and loaded on to a Waters AP2 column (2 cm×20 cm) packed with TSKgel SuperQ 5PW (Tosoh Biosciences). Purification was performed on an ÄKTA 100 Explorer (GE Healthcare) using 20 mM NaOH and 2.5 M NaCl as eluents. Fractions were analyzed for purity. In some embodiments, purification after this initial purification may not be as high (for example, the pooled fraction having a purity of about 65%). If desired, further purification can be performed to increase purity. For example, a pooled fraction (162 mL, 7785 OD) was diluted to 1500 mL and re-purified on Source 15Q using the conditions described above, increasing the purity from about 65% to >83% with a yield of 2385 OD.

[1722] Desalting of WV-8095: The purified WV-8095 sample (2385 OD) was then desalted on 2K generated cellulose membrane with no material loss. The desalted material was then lyophilized to obtain 75 mg of WV-8095 as a white powder. MW (Calc.): 7953.95; MS (Found): 7953.2.

### Example 21. Preparation of WV-8061

[1723] Triantennay GalNAc (30.4 mg, 1.6 eq), and HATU (5.44 mg, 1.5 eq.) were transferred into a 50-mL plastic tube. Anhydrous acetonitrile (1.5 mL) was then added to the tube to dissolve the mixture. This was followed by the addition of DIPEA (d=0.742, 16.86 uL, 10 eq) into the tube. The mixture was then shaken for 10 min at room temperature. This mixture was then added to WV-8095 (75 mg) dissolved in water (3.0 mL) and the mixture was shaken for 60 min at 37° C. The progress of the reaction was monitored by UPLC. It was found that the reaction was complete after 1h. The reaction mixture was concentrated under vacuum (by speed vac) to remove acetonitrile. The resultant GalNAc-conjugated oligo WV-8061 was then treated with conc. ammonium hydroxide (2 mL) for 1 h at 37° C. The formation of the final product was monitored by UPLC. The ammonia hydroxide in the sample was evaporated under vacuum (by speed vac) overnight. The conjugated samples were dissolved in water and purified by reversed phase HPLC. Following purification the material was desalted and lyophilized to obtain WV-8061 with a yield of 1400 OD. MW (Calc.): 9562.8; MS (Found): 9561.7.

### Example 22. Preparation of WV-8094—Example Vinyl Phosphonate Deprotection

[1724] DMT-5′-VP-dT amidite was utilized to incorporate 5′-VP-dT. To deprotect the 5′—VP group, after preparation of the oligonucleotide chain, into a plastic container with the oligonucleotide bound support (250 umol), a bright yellow mixture of TMSI, DCM and pyridine (125 mL) in the v/v ratio of 3:96:2 was added and the mixture shaken at room temperature for 30 min. The TMSI solution was then decanted and the solid support treated with a mixture of 2-Dodecane Thiol, TEA and ACN (125 mL×3) in the v/v ratio of 24:38:38. A final charge of the 2-Dodecane mixture was added and allowed to stand for 45 min. The mixture was then filtered, the support washed with ACN (50 mL×3) and then standard cleavage and base deprotection performed as described for WV-8095. MW (Calc.): 8028.9; MS (Found): 8030.2.

### Example 23. Preparation of 5′-triazole

[chemical structure]

[1726] A mixture of the corresponding azide (1.5 μmol), 5′-alkynyl oligonucleotide (1 μmol), CuSO₄ (10 μmop sodium ascorbate (100 μmop and trishydroxypropyltriazole (70 μmop in 0.2 M NaCl solution is stirred for 1 hour. After completion of reaction, purification of the crude product is done by RP-HPLC or IEX-HPLC. After HPLC purification, pure fractions are combined and solvent is removed under vacuum. Residue is dissolved in water, desalted and lyophilized to give the product.

[1727] In some embodiments, n is 0-10. In some embodiments, n is 1-10. In some embodiments, X is —C(R¹)(R²)—, wherein each of R¹ and R² is independently R. In some embodiments, X is —O—. In some embodiments, X is —S—. In some embodiments, X is —NR—. In some embodiments, each of R, R¹ and R² is independently —H, or an optionally substituted group selected from alkyl, allyl and aryl. In some embodiments, each of R, R¹ and R² is independently —H, or an optionally substituted group selected from C₁₋₁₀ alkyl, C₃₋₁₀ allyl and C₆₋₁₀ aryl. In some embodiments, R is —H. In some embodiments, R¹ is —H. In some embodiments, R² is —H.

### Example 24. Provided Technologies Provide High Activities

[1728] For ssRNAi, it has been widely accepted prior to the present disclosure that 5′-phosphorylation is required for activity. In some embodiments, the present disclosure, surprisingly, demonstrated that with features provided in the present disclosure, oligonucleotides without 5′-phosphorylation can deliver activities comparable to, or higher than, oligonucleotides of traditional ssRNAi designs with 5′-phosphorylation. For examples, see data provided in the Tables.

### Example 25. Provided 5′-End Structures Provide High Activities

[1729] In some embodiments, the present disclosure provides various 5′-end structures. Among other things, the present disclosure demonstrated that oligonucleotides comprising provided 5′-end modifications can be highly active and/or stable, for example, when used as ssRNAi reagents. For example, as shown in Table 46, provided oligonucleotide WV-7645 demonstrated surprisingly high activity, with an IC50 as low as 7 pM.

### Example 26. Provided Technologies Provide High Activity and/or Selectivity/Specificity

[1730] Among other things, the present disclosure provides technologies that can achieve high activity and/or selectivity/specificity, including knockdown of target gene expression (e.g., mRNA level) and/or target protein level. As demonstrated herein, including, but not limited to, the data in the Tables below, provided technologies can selectively reduce the level of one mRNA but not a homologous mRNA which differs from it by only one base. Thus, in some embodiments, the present disclosure provides technologies that can achieve allele-specific reduction of levels of transcripts/products of a disease-associated allele, while maintaining levels of transcripts/products of a normal allele; see, e.g., Table 61. Oligonucleotides are described in detail in Table 1A.

[1731] Table 12. Table 12 shows the IC₅₀ for different single-stranded RNAi agents, which target APOC3. Tested oligonucleotides are: WV-1275, WV-1277, WV-1828, WV-1829, WV-1830 and WV-1831. CI, confidence interval. Cells used were Hep3B, and oligonucleotides for APOC3 were delivered using Lipofectamine® 2000 transfection reagent (ThermoFisher, Grand Island, N.Y.).

TABLE 12
Activity of APOC3 oligonucleotides.

| Oligonucleotide | IC50 (nM) |
|---|---|
| WV-1275 | 1.35 |
| WV-1277 | 1.94 |
| WV-1828 | 0.43 |
| WV-1829 | 0.67 |
| WV-1830 | 0.689 |
| WV-1831 | 0.986 |

[1732] Table 13. Table 13 shows the in vitro potency for different single-stranded RNAi agents, which target APOC3. Tested oligonucleotides are: WV-2110, WV-3068, WV-2817, WV-2818, WV-2720, WV-2721, and WV-3021.

TABLE 13
Activity of APOC3 oligonucleotides.

| Conc. (exp | | | | | | | | |
|---|---|---|---|---|---|---|---|---|
| 10) (nM) | WV-2110 | | WV-3068 | | WV-2817 | | WV-2818 | |
| 1.398 | 0.254 | 0.263 | 0.085 | 0.089 | 0.276 | 0.224 | 0.176 | 0.219 |
| 0.792 | 0.308 | 0.288 | 0.094 | 0.084 | 0.219 | 0.187 | 0.155 | 0.121 |
| 0.204 | 0.563 | 0.587 | 0.203 | 0.179 | 0.280 | 0.390 | 0.171 | 0.181 |
| −0.398 | 0.797 | 0.848 | 0.382 | 0.387 | 0.515 | 0.508 | 0.409 | 0.374 |
| −1.000 | 0.988 | 1.037 | 0.595 | 0.629 | 0.791 | 0.713 | 0.595 | 0.634 |
| −1.602 | 1.008 | 1.015 | 0.884 | 0.830 | 0.994 | 1.001 | 0.921 | 0.896 |
| −2.204 | 0.909 | 0.884 | 0.934 | 0.890 | 1.015 | 1.022 | 0.941 | 0.988 |
| −2.824 | 0.941 | 1.081 | 0.842 | 0.954 | 0.842 | 0.902 | 0.836 | 0.902 |

| Conc. (exp | | | | | | |
|---|---|---|---|---|---|---|
| 10) (nM) | WV-2720 | | WV-2721 | | WV-3021 | |
| 1.398 | 0.328 | 0.330 | 0.328 | 0.272 | 0.265 | 0.205 |
| 0.792 | 0.356 | 0.304 | 0.337 | 0.298 | 0.199 | 0.144 |
| 0.204 | 0.490 | 0.508 | 0.571 | 0.522 | 0.245 | 0.229 |
| −0.398 | 0.890 | 0.842 | 0.842 | 0.769 | 0.424 | 0.415 |
| −1.000 | 0.921 | 0.947 | 0.915 | 0.915 | 0.718 | 0.661 |
| −1.602 | 1.051 | 1.015 | 1.073 | 0.974 | 0.941 | 0.866 |
| −2.204 | 1.066 | 1.073 | 1.066 | 0.915 | 1.051 | 0.902 |
| −2.824 | 0.915 | 1.022 | 0.830 | 0.981 | 0.860 | 0.988 |

In Tables 13, 14, 20 and others: the Conc. in the first column is presented as an exponent (exp) of 10; e.g., 1.398 indicates 10^{1.398} nM. In various columns, data from replicate experiments is shown. Numbers indicate residual mRNA level (e.g., 0.254 in column 2, row 2 represents 25.4% residual mRNA level relative to control, or 74.6% knockdown).

[1733] Table 14. Table 14 shows the in vitro potency different single-stranded RNAi agents, which target APOC3. Tested oligonucleotides are: WV-2817 and WV-3021.

TABLE 14
Activity of APOC3 oligonucleotides.

| | | |
|---|---|---|
| Conc. (exp | | |
| 10) (nM) | WV-2817 | WV-3021 |

| | | | | |
|---|---|---|---|---|
| 1.398 | 0.276 | 0.224 | 0.265 | 0.205 |
| 0.792 | 0.219 | 0.187 | 0.199 | 0.144 |
| 0.204 | 0.280 | 0.390 | 0.245 | 0.229 |
| −0.398 | 0.515 | 0.508 | 0.424 | 0.415 |
| −1.000 | 0.791 | 0.713 | 0.718 | 0.661 |
| −1.602 | 0.994 | 1.001 | 0.941 | 0.866 |
| −2.204 | 1.015 | 1.022 | 1.051 | 0.902 |
| −2.824 | 0.842 | 0.902 | 0.860 | 0.988 |

[1734] Table 15. Table 15 shows in vitro potency, including knockdown of mRNA (Table 15A) and protein levels (Table 15B) of APOC3, for two single-stranded RNAi agents: WV-1868 and WV-2110.

TABLE 15A
Activity of APOC3 oligonucleotides.

| | | |
|---|---|---|
| Conc. (nM) | WV-1868 | WV-2110 |

| | | | | |
|---|---|---|---|---|
| 0 | 100.000 | 100.000 | 100.000 | 100.000 |
| 0.1 | 101.965 | 112.356 | 91.261 | 78.899 |
| 0.4 | 97.136 | 81.117 | 64.086 | 66.807 |
| 1.6 | 62.767 | 64.531 | 33.173 | 32.043 |
| 6.2 | 32.043 | 29.282 | 19.725 | 19.053 |
| 25 | 15.692 | 11.810 | 19.862 | 20.279 |

In Tables 15 and others: the Conc. in the first column is presented in nM. In various columns, data from replicate experiments are shown. In Tables 15 and others wherein the highest activity number is around 100: Numbers indicate residual mRNA level, e.g., 100.000 in column 2, row 2 represents 100.000% residual mRNA level relative to control, or 0% knockdown; and 0.000 would indicate 0% residual mRNA level or 100% knockdown

TABLE 15A
Activity of APOC3 oligonucleotides.

| Conc. (nM) | WV-1868 | | WV-2110 | |
|---|---|---|---|---|
| 0 | 96.73199783 | 103.268 | 104.7948 | 95.2052 |
| 0.1 | 98.21632145 | 85.76992 | 82.96123 | 82.66324 |
| 0.4 | 65.44366917 | 64.85707 | 41.62211 | 43.6669 |
| 1.6 | 24.87594999 | 23.73695 | 12.00211 | 12.84661 |
| 6.2 | 0.022395917 | 0.022396 | 0.242648 | 1.803896 |
| 25 | 0.022396 | 0.022396 | 0.242648 | 2.337392 |

[1735] Table 16. Table 16 shows the IC₅₀ for different single-stranded RNAi agents, which all target the same sequence in APOC3, in Hep3B cells. Tested oligonucleotides are: WV-3068, WV-2818, WV-2817, WV-2721, WV-2720, WV-2110, and WV-3021. Results of two experiments are shown.

TABLE 16
Activity of APOC3 oligonucleotides.

| Oligonucleotide | Experiment 1: IC50 (nM) | Experiment 2: IC50 (nM) |
|---|---|---|
| WV-1868 | 1.90 | 0.578 |
| WV-2110 | 0.583 | 0.172 |
| WV-3068 | 0.318 | 0.051 |
| WV-2817 | 0.182 | 0.039 |
| WV-2818 | 0.317 | 0.059 |
| WV-2720 | 0.555 | 0.173 |
| WV-2721 | 1.15 | 0.432 |
| WV-3021 | 0.115 | 0.021 |

[1736] Table 17. Table 17 shows the IC₅₀ and 95% CI (confidence interval) (pM) for different single-stranded RNAi agents, which both target the same sequence in APOC3. Tested oligonucleotides are: WV-1307 and WV-1308.

TABLE 17
Activity of APOC3 oligonucleotides.

| Oligonucleotide | IC 50 (pM) | 95% CI (pM) |
|---|---|---|
| WV-1307 | 1581 | 634 to 3941 |
| WV-1308 | 235 | 192 to 288 |

[1737] Table 18. Table 18 shows the IC₅₀ and 95% CI (pM) for different single-stranded RNAi agents, which target the same sequence in APOC3. Tested oligonucleotides are: WV-2134, WV-1308, and WV-2420. WV-2134 is an antisense oligonucleotide which knocks down the target via RNase H-mediated knockdown; WV-1308 and WV-2420 are single-stranded RNAi agents.

TABLE 18
Activity of APOC3 oligonucleotides.

| Oligonucleotide | IC 50 (pM) | 95% CI (pM) |
|---|---|---|
| WV-2134 | 815 | 521 to 2798 |
| WV-1308 | 197 | 353 to 1716 |
| WV-2420 | 51 | 90 to 233 |

[1738] Table 19. Table 19 shows the IC₅₀ for different single-stranded RNAi agents, which target the same sequence in APOC3, in in Hep3B cells (tested at 48 hours). Tested oligonucleotides are: WV-2110, WV-2716, WV-2717, WV-2718, and WV-2719.

TABLE 19
Activity of APOC3 oligonucleotides.

| Oligonucleotide | IC 50 (pM) |
|---|---|
| WV-2110 | 160 |
| WV-2716 | 1456 |
| WV-2717 | 1841 |
| WV-2718 | 4585 |
| WV-2719 | 5645 |

[1739] Table 20. Table 20 shows the in vitro potency for different single-stranded RNAi agents, which target the same sequence in APOC3, in in Hep3B cells (tested at 48 hours). Tested oligonucleotides are: WV-2110, WV-2712, WV-2713, WV-2714, and WV-2715. IC50 of various oligonucleotides: WV-2110, 160 pM; WV-2712, 1743 pM; and WV-2713, 950 pM.

TABLE 20
Activity of APOC3 oligonucleotides.

| Conc. (exp | | | | | | |
|---|---|---|---|---|---|---|
| 10) (nM) | WV-2110 | | WV-2712 | | WV-2713 | |
| 1.398 | 0.260 | 0.269 | 0.136 | 0.171 | 0.097 | 0.166 |
| 0.792 | 0.262 | 0.228 | 0.202 | 0.310 | 0.203 | 0.224 |
| 0.204 | 0.241 | 0.248 | 0.579 | 0.684 | 0.480 | 0.442 |
| −0.398 | 0.459 | 0.453 | 0.848 | 0.961 | 0.890 | 0.808 |
| −1.000 | | 0.711 | 1.150 | 1.008 | 0.759 | |
| −1.602 | 0.900 | 1.077 | | 1.175 | | 1.119 |
| −2.204 | 0.978 | 1.077 | 0.981 | 1.008 | 1.285 | 1.303 |
| −2.824 | 1.005 | 1.005 | 1.119 | 0.961 | 0.884 | 1.088 |

| | | |
|---|---|---|
| Conc. (exp | | |
| 10) (nM) | WV-2714 | WV-2715 |

| | | | | |
|---|---|---|---|---|
| 1.398 | 0.903 | 0.842 | 0.981 | 0.764 |
| 0.792 | 1.066 | 1.081 | 0.988 | 1.066 |
| 0.204 | | 1.166 | 1.008 | 1.166 |
| −0.398 | 1.088 | 1.285 | 1.208 | 1.233 |
| −1.000 | 1.023 | 1.119 | 1.368 | 1.259 |
| −1.602 | 0.967 | 1.378 | 1.030 | 1.191 |
| −2.204 | 0.988 | 1.135 | 1.015 | 1.191 |
| −2.824 | 0.974 | 1.023 | 0.866 | 0.941 |

[1740] Table 21. Table 21 shows the IC₅₀ and 95% CI for different single-stranded RNAi agents, which target APOC3. Tested oligonucleotides are: WV-1868, WV-2110, and WV-2111. WV-1868 is an antisense oligonucleotide (operating through RNase H-mediated knockdown), while other tested oligonucleotides are RNAi agents.

TABLE 21
Activity of APOC3 oligonucleotides.

| Oligonucleotide | IC 50 (pM) | 95% CI (pM) |
|---|---|---|
| WV-1868 | 266 | 176 to 403 |
| WV-2110 | 64 | 37 to 110 |
| WV-2111 | 163 | 64 to 412 |

[1741] Table 22. Table 22 shows the IC₅₀ and 95% CI (pM) for different single-stranded RNAi agents, which target overlapping sequences in APOC3, in in Hep3B cells (tested at 48 hours). Tested oligonucleotides are: WV-2110, WV-2693, WV-2696, WV-2697, WV-2698, and WV-2699.

TABLE 22
Activity of APOC3 oligonucleotides.

| Conc. (exp | | | | | | | | |
|---|---|---|---|---|---|---|---|---|
| 10) (nM) | WV-2110 | | WV-2693 | | WV-2696 | | WV-2697 | |
| 1.398 | 0.313 | 0.336 | 0.345 | 0.318 | 0.368 | 0.309 | 0.542 | 0.375 |
| 0.792 | 0.301 | 0.296 | 0.286 | 0.348 | 0.307 | 0.307 | 0.370 | 0.282 |
| 0.204 | 0.322 | 0.311 | 0.341 | 0.394 | 0.413 | 0.311 | 0.440 | 0.419 |
| −0.398 | 0.499 | 0.520 | 0.437 | 0.581 | 0.495 | 0.492 | 0.710 | 0.735 |
| −1.000 | 0.756 | 0.782 | 0.788 | 0.740 | 0.662 | 0.695 | 0.886 | 0.788 |
| −1.602 | 1.011 | | 0.799 | 0.997 | 0.924 | 0.844 | 1.011 | 1.145 |
| −2.204 | | 1.047 | 0.911 | 1.122 | 0.977 | 0.821 | 1.061 | 1.186 |
| −2.824 | 0.970 | 0.983 | 0.886 | 0.937 | 1.069 | 0.893 | | 0.997 |

| Conc. (exp | | | | | | |
|---|---|---|---|---|---|---|
| 10) (nM) | WV-2697 | | WV-2698 | | WV-2699 | |
| 1.398 | 0.542 | 0.375 | 0.305 | 0.256 | 0.373 | 0.282 |
| 0.792 | 0.370 | 0.282 | 0.275 | 0.239 | 0.305 | 0.249 |
| 0.204 | 0.440 | 0.419 | 0.391 | 0.341 | 0.428 | 0.368 |
| −0.398 | 0.710 | 0.735 | 0.585 | 0.506 | 0.667 | 0.662 |
| −1.000 | 0.886 | 0.788 | | 0.761 | | 0.788 |
| −1.602 | 1.011 | 1.145 | 0.827 | 0.893 | 0.905 | 0.844 |
| −2.204 | 1.061 | 1.186 | 1.069 | 0.804 | 1.054 | |
| −2.824 | | 0.997 | 0.963 | 0.821 | 0.950 | 0.839 |

[1742] Table 23. Table 23 shows the IC₅₀ and 95% CI (pM) for different single-stranded RNAi agents, which target APOC3, in Hep3B cells (tested at 48 hours). Tested oligonucleotides are: WV-2110, WV-2154, and WV-2155. The latter two oligonucleotides comprise at 2′-deoxy T at the penultimate (second-to-last) or antepenultimate (third-to-last) nucleotide.

TABLE 23
Activity of APOC3 oligonucleotides.

| Oligonucleotide | IC 50 (pM) | 95% CI (pM) |
|---|---|---|
| WV-2110 | 64 | 37 to 110 |
| WV-2154 | 120 | 71 to 202 |
| WV-2155 | 74 | 22 to 255 |

[1743] Table 24. Table 24 shows the IC₅₀ and 95% CI for different single-stranded RNAi agents, which target APOC3, in Hep3B cells (tested at 48 hours). Tested oligonucleotides are: WV-2111, WV-2156, and WV-2157.

TABLE 24
Activity of APOC3 oligonucleotides.

| Oligonucleotide | IC 50 (pM) | 95% CI (pM) |
|---|---|---|
| WV-2111 | 163 | 63 to 416 |
| WV-2156 | 118 | 43 to 325 |
| WV-2157 | 245 | 111 to 540 |

[1744] Table 25. Table 25 shows the in vitro potency and IC₅₀ for different single-stranded RNAi agents, which target APOC3, in PCH (Primary Cyno Hepatocytes). Tested oligonucleotides are: WV-1868, WV-2110, WV-3068 and WV-3069. WV-1868 is an antisense oligonucleotide (operating through RNase H-mediated knockdown), while other tested oligonucleotides are RNAi agents. The penultimate nucleotide in WV-3068 (nucleotide 20) or WV-3069 (nucleotide 24) comprises a AMC6T (GalNAc). Gym indicates the oligonucleotide was delivered via gymnotic delivery. IC50 of various oligonucleotides: WV-1868, 4.06 nM; WV-2110, 1.58 nM; and WV-3068, 0.25 nM

TABLE 25
Activity of APOC3 oligonucleotides.

| Conc. (exp | | | | | | |
|---|---|---|---|---|---|---|
| 10) (nM) | WV-1868 | | WV-2110 | | WV-3068 | |
| 1.398 | 0.120 | 0.107 | 0.210 | 0.225 | 0.071 | 0.062 |
| 0.792 | 0.384 | 0.366 | 0.262 | 0.247 | 0.065 | 0.071 |
| 0.204 | 0.763 | 0.732 | 0.578 | 0.532 | 0.177 | 0.152 |
| −0.398 | 0.882 | 0.966 | 0.835 | 0.801 | 0.341 | 0.328 |
| −1.000 | 0.966 | 0.946 | 0.895 | 0.959 | 0.574 | 0.637 |
| −1.602 | 1.094 | 1.014 | | 0.986 | 0.858 | 0.784 |
| −2.204 | 0.870 | 0.858 | 0.858 | 0.835 | 0.823 | 0.763 |
| −2.824 | 0.914 | 0.939 | 0.933 | 0.823 | 0.818 | 0.829 |

| | | |
|---|---|---|
| Conc. (exp | | |
| 10) (nM) | WV-3068-Gym | WV-3069 |

| | | | |
|---|---|---|---|
| 1.398 | 0.594 | 0.590 | 0.170 |
| 0.792 | 0.642 | 0.655 | 0.179 |
| 0.204 | 0.752 | 0.747 | 0.381 |
| −0.398 | 0.768 | 0.707 | 0.737 |
| −1.000 | 0.702 | 0.790 | 0.742 |
| −1.602 | 0.806 | 0.841 | 0.889 |
| −2.204 | 0.823 | 0.784 | 1.000 |
| −2.824 | 0.707 | 0.758 | 0.876 |

[1745] Table 26. Table 26 shows the IC₅₀ for different single-stranded RNAi agents, which target APOC3, in Hep3B cells (tested at 48 hours). Tested oligonucleotides are: WV-1868, WV-2110, WV-3068, WV-2818, WV-2817, WV-2721, WV-2720, WV-2110, WV-3021.

TABLE 26
Activity of APOC3 oligonucleotides.

| Oligonucleotide | IC50 (nM) |
|---|---|
| WV-1868 | 1.90 |
| WV-2110 | 0.583 |
| WV-3068 | 0.318 |
| WV-2817 | 0.182 |
| WV-2818 | 0.317 |
| WV-2720 | 0.555 |
| WV-2721 | 1.15 |
| WV-3021 | 0.115 |

[1746] Table 27. Table 27 shows the IC₅₀ for different single-stranded RNAi agents, which target APOC3, in PCH (Primary Cyno Hepatocytes). Tested oligonucleotides are: WV-2110 and WV-3068; and WV-2420 and WV-2386.

TABLE 27
Activity of APOC3 oligonucleotides.

| Oligonucleotide | IC50 (nM) |
|---|---|
| WV-2110 | 1.29 |
| WV-3068 | 0.20 |
| WV-2386 | 1.60 |
| WV-2420 | 0.13 |

[1747] Table 28. Table 28 shows the IC₅₀ for different single-stranded RNAi agents, which target APOC3, in Hep3B cells (tested at 48 hours). Tested oligonucleotides are: WV-2420, WV-2652, WV-2653, and WV-2654. Various oligonucleotides comprise at the 5′ end a PO (WV-2420); PH or H-phosphonate (WV-2652); PS or phosphorothioate (WV-2653); or C3 PO (Mod022), as defined in the legend of Table 1A (WV-2654).

TABLE 28
Activity of APOC3 oligonucleotides.

| Oligonucleotide | IC 50 (pM) |
|---|---|
| WV-2420 | 50 |
| WV-2652 | 300 |
| WV-2653 | 104 |
| WV-2654 | 1000 |

[1748] Table 29. Tables 29A and 29B show the in vitro potency and IC₅₀ for different single-stranded RNAi agents, which target APOC3, in Hep3B cells (tested at 48 hours). Tested oligonucleotides are: WV-1308, WV-2114, WV-2150, WV-2151, WV-2114, WV-2152, and WV-2153.

TABLE 29A
Activity of APOC3 oligonucleotides.

| | | |
|---|---|---|
| Conc. (exp | | |
| 10) (nM) | WV-1308 | WV-2114 |

| | | | | |
|---|---|---|---|---|
| 0.792 | 0.133 | 0.124 | 0.092 | 0.087 |
| 0.204 | 0.184 | 0.164 | 0.265 | 0.256 |
| −0.398 | 0.329 | 0.326 | 0.557 | 0.538 |
| −1.000 | 0.584 | 0.622 | 0.809 | 0.826 |
| −1.602 | 0.685 | 0.867 | 0.714 | 0.936 |
| −2.204 | 0.892 | 0.844 | 0.879 | 0.826 |
| −2.807 | 0.956 | 0.936 | 0.809 | 0.962 |

TABLE 29B
Activity of APOC3 oligonucleotides.

| Oligonucleotide | IC 50 (pM) | 95% CI (pM) |
|---|---|---|
| WV-1308 | 144 | 88 to 235 |
| WV-2114 | 628 | 333 to 1183 |

In addition, in one experiment, WV-2150 and WV-2151 demonstrated in vitro activity that was similar to WV-1308 (data not shown); and in a different experiment, WV-2152 and WV-2153 demonstrated in vitro activity slightly better than that of WV-2114 (data not shown).

[1749] Table 30. Table 30 shows the in vitro potency of single-stranded RNAi agents to APOC3: WV-1275, WV-1828, and WV-1308.

TABLE 30
Activity of APOC3 oligonucleotides.

| Oligonucleotide | IC50 (nM) |
|---|---|
| WV-1275 | 1.5 |
| WV-1828 | 0.44 |
| WV-1308 | 0.067 |

[1750] Table 31. Table 31 shows the in vitro potency and IC₅₀ for different single-stranded RNAi agents, which target APOC3, in Hep3B cells (tested at 48 hours). Tested oligonucleotides are: WV-2420, WV-2655, WV-2656, WV-2657, and WV-2658. Various oligonucleotides comprise at the 5′ end a PO (WV-2420), C3 PS (Mod022*) (WV-2655), C3dimethyl PH (WV-2656), C3dimethyl PO (WV-2657), or C3dimethyl PS (WV-2658).

TABLE 31
Activity of APOC3 oligonucleotides.

| | | |
|---|---|---|
| Conc. (exp | | |
| 10) (nM) | WV-2420 | WV-2655 |

| | | | | |
|---|---|---|---|---|
| 0.792 | 0.208 | 0.119 | 0.561 | 0.568 |
| 0.204 | 0.211 | 0.186 | 0.832 | 0.782 |
| −0.398 | 0.318 | 0.282 | 1.090 | 0.886 |
| −1.000 | 0.481 | 0.458 | 0.956 | 0.923 |
| −1.602 | 0.850 | 0.798 | 0.880 | 0.787 |
| −2.204 | 0.936 | 0.949 | 1.121 | 0.923 |
| −2.806 | 1.244 | 0.949 | 0.943 | 0.911 |

| Conc. (exp | | | | | | |
|---|---|---|---|---|---|---|
| 10) (nM) | WV-2656 | | WV-2567 | | WV-2658 | |
| 0.792 | 0.917 | 0.695 | 0.667 | 0.667 | 0.541 | 0.468 |
| 0.204 | 0.969 | 0.776 | 0.793 | 0.740 | 0.776 | 0.735 |
| −0.398 | 1.032 | 0.917 | 0.956 | 0.868 | 0.793 | 0.826 |
| −1.000 | 1.083 | 0.898 | 1.025 | 0.856 | 0.930 | 0.892 |
| −1.602 | 1.400 | 1.261 | 1.553 | 1.553 | 1.699 | 1.288 |
| −2.204 | 0.862 | 0.838 | 0.874 | 0.729 | 0.880 | 0.793 |
| −2.806 | 0.963 | 0.838 | 0.917 | 0.923 | 1.003 | 0.904 |

[1751] Table 32. Table 32 shows the IC₅₀ for different single-stranded RNAi agents, which target APOC3: WV-2110, WV-3122, WV-3124 to WV-3127, and WV-3133 to WV-3137.

TABLE 32
Activity of APOC3 oligonucleotides.

| Oligonucleotide | IC50 (nM) |
|---|---|
| WV-2110 | 0.8185 |
| WV-3122 | 0.3884 |
| WV-3124 | 0.9753 |
| WV-3125 | ~1.709 |
| WV-3126 | 1.469 |
| WV-3127 | 3.466 |
| WV-3133 | 2.44 |
| WV-3134 | 6.81 |
| WV-3135 | 1.473 |
| WV-3136 | 1.176 |
| WV-3137 | 13.9 |

[1752] Table 33. Table 33 shows the in vitro potency and IC₅₀ for different single-stranded RNAi agents, which target APOC3: WV-1868, WV-2110, and WV-3068. Data from replicate experiments are shown. The penultimate nucleotide of WV-3068 comprises a TGaNC6T.

TABLE 33
Activity of APOC3 oligonucleotides.

| Oligonucleotide | IC50 (nM) | IC50 (nM) |
|---|---|---|
| WV-1868 | 4.06 | 3.36 |
| WV-2110 | 1.58 | 1.29 |
| WV-3068 | 0.24 | 0.20 |

[1753] Table 34. Table 34 shows the in vitro potency and IC₅₀ for different single-stranded RNAi agents, which target APOC3: WV-1868, WV-2110, WV-3068, WV-2817, WV-2818, WV-2720, WV-2721, and WV-3021. The penultimate nucleotide of various oligonucleotides is or comprises a 2′-deoxy T (WV-3021 and WV-2817), aminomodifier (WV-2818), or TGaNC6T (WV-3068).

TABLE 34
Activity of APOC3 oligonucleotides.

| Oligonucleotide | IC50 (nM) |
|---|---|
| WV-1868 | 3.36 |
| WV-2110 | 1.29 |
| WV-3068 | 0.20 |
| WV-2817 | 0.25 |
| WV-2818 | 0.17 |
| WV-2720 | 0.9 |
| WV-2721 | 1.06 |
| WV-3021 | 0.17 |

[1754] Table 35. Table 35 shows the in vitro potency and IC₅₀ for different single-stranded RNAi agents, which target APOC3: WV-2110, WV-3068, WV-2420, and WV-2386.

TABLE 35
Activity of APOC3 oligonucleotides.

| Oligonucleotide | IC50 (nM) |
|---|---|
| WV-2110 | 0.583 |
| WV-3068 | 0.318 |
| WV-2386 | 2.80 |
| WV-2420 | 0.27 |

[1755] Additional testing was performed on the in vitro potency for different single-stranded RNAi agents, which target APOC3: WV-3242, WV-5289, WV-5291, WV-5293, WV-5295, WV-5297, WV-5299, and WV-5301.

[1756] In one experiment, WV-2110, WV-2154 and WV-2155 all had substantial and substantially similar activity in vitro (data not shown). WV-2155 comprises a 2′-deoxy T at the antepenultimate nucleotide; WV-2154 comprises a 2′-deoxy T at the penultimate nucleotide; and WV-2110 comprises 2′-OMe at both the penultimate and antepenultimate nucleotides

[1757] In one experiment, WV-3242, WV-5289, WV-5291, WV-5293, WV-5295, WV-5297, and WV-5299 all demonstrated substantial and substantially identical activity in vitro; these various oligonucleotides all comprise a penultimate nucleotide comprising a 2′-deoxy T and have various different lengths (data not shown). WV-5301 showed some in vitro activity, though lower than the other oligonucleotides tested in that experiment.

[1758] Table 37. Table 37 shows the in vitro potency and IC₅₀ for different single-stranded RNAi agents, which target APOC3: WV-2817, WV-5288, WV-5290, WV-5292, WV-5294, and WV-5296. These various oligonucleotides comprise a 2′-deoxy T at the penultimate nucleotide and have various lengths.

TABLE 37
Activity of APOC3 oligonucleotides.

| Oligonucleotide | IC50 (nM) |
|---|---|
| WV-2817 | 0.066 |
| WV-5288 | 0.032 |
| WV-5290 | 0.003 |
| WV-5292 | 0.053 |
| WV-5294 | 0.012 |
| WV-5296 | 0.013 |
| WV-5298 | 0.015 |

[1759] Table 38. Table 38 shows the in vitro potency and IC₅₀ for different single-stranded RNAi agents, which target APOC3: WV-5290, WV-5291, WV-6431 to WV-6438, WV-6763, and WV-2477. In various oligonucleotides, the post-seed region comprises a stretch of nucleotides having patterns of modification of: mfmf, mfmfmfm, mmmmmmm, or MMMMMMM, wherein m is 2′-OMe, f is 2′-F, and M is 2′-MOE. In some oligonucleotides, the penultimate nucleotide is 2′-deoxy T.

TABLE 38
Activity of APOC3 oligonucleotides.

| Oligonucleotide | IC50 (nM) | 95% CI (nM) |
|---|---|---|
| WV-5290 | 0.106 | 0.074-0.151 |
| WV-5291 | 0.318 | 0.214-0.473 |
| WV-6431 | 0.112 | 0.063-0.202 |
| WV-6432 | 0.105 | 0.056-0.195 |
| WV-6433 | 0.145 | 0.092-0.228 |
| WV-6434 | 0.293 | 0.165-0.520 |
| WV-6435 | 0.136 | 0.091-0.204 |
| WV-6436 | 0.124 | 0.088-0.174 |
| WV-6437 | 0.209 | 0.156-0.281 |
| WV-6438 | 0.212 | 0.158-0.285 |
| WV-6763 | 0.079 | 0.062-0.100 |

[1760] Table 39. Table 39 shows the in vitro potency for different single-stranded RNAi agents, which target APOC3: WV-5291, WV-6411 to 6430, WV-6764, WV-6765, and WV-2477. Various oligonucleotides have different base sequences and different patterns of 2′-F, 2′-OMe and 2′-MOE. Some oligonucleotides comprise a 2′-deoxy T at the penultimate nucleotide.

TABLE 39
Activity of APOC3 oligonucleotides.

| nM | WV-5291 | | WV-6411 | | WV-6412 | | WV-6413 | | WV-6414 | | WV-6415 | |
|---|---|---|---|---|---|---|---|---|---|---|---|---|
| 30.0 | 8.1 | 6.2 | 25.5 | 27.5 | 25.0 | 28.3 | 23.8 | 28.8 | 27.6 | 26.1 | 27.3 | 23.3 |
| 10.0 | 19.6 | 16.5 | 39.6 | 32.1 | 38.9 | 38.0 | 38.5 | 41.1 | 41.9 | 40.9 | 39.3 | 37.8 |
| 3.3 | 20.7 | 24.6 | 26.2 | 26.8 | 27.2 | 27.9 | 29.5 | 32.2 | 31.9 | 28.4 | 27.9 | 30.4 |
| 1.1 | 27.8 | 33.1 | 27.6 | 25.9 | 26.5 | 25.8 | 24.6 | 27.3 | 29.6 | 28.6 | 27.7 | 31.0 |
| 0.4 | 45.9 | 48.9 | 39.0 | 39.1 | 38.0 | 38.3 | 37.7 | 38.0 | 45.6 | 44.6 | 39.4 | 42.0 |
| 0.1 | 81.3 | 92.7 | 75.0 | 77.5 | 64.4 | 70.6 | 64.9 | 63.4 | | 76.5 | 81.1 | 77.1 |
| 0.0 | 100.3 | 93.2 | 87.3 | 95.2 | 102.5 | 91.7 | 84.8 | 80.4 | 92.6 | 92.8 | 100.0 | 93.4 |
| 0.0 | 102.1 | 82.7 | 97.9 | 106.3 | 104.0 | 106.0 | 91.7 | 100.5 | 103.3 | 97.0 | 107.5 | 96.5 |
| 0.0 | 97.0 | 101.6 | 111.5 | 107.4 | 108.9 | 106.9 | 97.6 | 107.6 | 107.8 | 96.4 | 102.8 | 97.4 |
| 0.0 | 103.5 | 100.8 | 116.3 | 110.0 | 102.8 | 97.6 | 97.9 | 104.5 | 102.7 | 100.6 | 100.9 | 103.0 |
| 0.0 | 87.6 | 101.8 | 109.5 | 109.7 | 99.2 | 101.2 | 100.2 | 111.5 | 108.9 | 97.5 | 103.7 | 101.8 |

| nM | WV-6416 | | WV-6417 | | WV-6418 | | WV-6419 | | WV-6420 | |
|---|---|---|---|---|---|---|---|---|---|---|
| 30.0 | 29.1 | 31.1 | 26.4 | 21.9 | 30.5 | 26.0 | 35.5 | 33.7 | 17.4 | 13.9 |
| 10.0 | 47.5 | 45.3 | 43.7 | 41.2 | 49.4 | 47.4 | 52.9 | 50.9 | 22.9 | 22.5 |
| 3.3 | 31.2 | 36.6 | 31.9 | 30.2 | 38.5 | 35.3 | 43.3 | 37.7 | 23.4 | 22.6 |
| 1.1 | 33.9 | 38.4 | 30.7 | 31.2 | 38.9 | 31.0 | 36.7 | 34.8 | 31.9 | 26.5 |
| 0.4 | 54.3 | 54.1 | 44.4 | 45.0 | 52.9 | 42.4 | 48.1 | 48.2 | 45.8 | 44.5 |
| 0.1 | 83.0 | 92.1 | 77.1 | 79.1 | 93.2 | 71.6 | 74.7 | 75.0 | 75.3 | 79.0 |
| 0.0 | 97.4 | 101.2 | 102.0 | 99.5 | 102.4 | 87.7 | 96.5 | 92.9 | 94.7 | 107.4 |
| 0.0 | 107.5 | 108.4 | 109.9 | 98.7 | 111.2 | 106.5 | 106.9 | 96.9 | 96.1 | 95.9 |
| 0.0 | 103.9 | 108.7 | 110.8 | 106.0 | 118.1 | 85.0 | 99.8 | 113.2 | 93.6 | 102.2 |
| 0.0 | 102.5 | 108.3 | 109.5 | 107.2 | 114.1 | 104.7 | 104.9 | 99.3 | 101.0 | 113.9 |
| 0.0 | 108.4 | 103.5 | 111.6 | 98.3 | 102.6 | 96.7 | 104.3 | 104.2 | 101.3 | 108.5 |
| nM | WV-6421 | | WV-6422 | | WV-6423 | | WV-6424 | | WV-6425 | |
| 30.0 | 24.1 | 17.4 | 17.5 | 11.4 | 18.6 | 13.3 | 18.1 | 10.7 | 32.0 | 14.5 |
| 10.0 | 27.4 | 25.7 | 24.3 | 20.6 | 22.7 | 20.3 | 23.0 | 19.8 | 30.8 | 23.1 |
| 3.3 | 27.8 | 25.1 | 29.2 | 24.9 | 30.7 | 24.0 | 24.7 | 20.2 | 33.8 | 23.7 |
| 1.1 | 34.8 | 33.4 | 39.0 | 34.0 | 44.0 | 43.2 | 29.2 | 31.2 | 44.6 | 32.3 |
| 0.4 | | | 56.7 | 53.3 | 72.3 | 67.6 | 48.8 | 42.2 | 71.5 | 52.6 |
| 0.1 | 76.4 | 73.7 | 88.7 | 82.2 | 95.7 | 85.9 | 86.4 | 65.6 | 102.5 | 79.1 |
| 0.0 | 99.3 | 85.6 | 102.7 | 93.7 | 99.9 | 89.2 | 97.5 | 81.0 | 117.7 | 96.3 |
| 0.0 | 112.1 | 92.3 | 109.1 | 94.9 | 101.5 | 100.4 | 106.3 | 94.7 | 115.4 | 96.0 |
| 0.0 | 102.1 | 110.0 | 111.0 | 112.5 | 107.5 | 101.5 | 111.7 | 96.5 | 105.8 | 101.5 |
| 0.0 | 105.6 | 97.4 | 99.7 | 100.6 | 106.2 | 105.2 | 101.3 | 105.2 | 102.5 | 98.4 |
| 0.0 | 113.5 | 96.3 | 123.0 | 105.0 | 90.2 | 98.5 | 96.4 | 99.1 | 98.2 | 96.1 |
| nM | WV-6426 | | WV-6427 | | WV-6428 | | WV-6429 | | WV-6430 | |
| 30.0 | 10.5 | 10.8 | 9.3 | 8.3 | 12.5 | 12.5 | 13.5 | 12.6 | 14.2 | 15.7 |
| 10.0 | 17.9 | 15.6 | 16.6 | 15.7 | 16.7 | 21.9 | 18.2 | 20.0 | 19.6 | 17.5 |
| 3.3 | 22.7 | 19.1 | 20.2 | 15.7 | 20.0 | 21.3 | 22.9 | 19.1 | 25.0 | 23.2 |
| 1.1 | 31.9 | 26.4 | 26.8 | 23.4 | 33.5 | 26.7 | 34.1 | 27.0 | 33.4 | 30.8 |
| 0.4 | 55.1 | 44.6 | 41.5 | 37.9 | 48.5 | 47.2 | 52.9 | 39.9 | 49.2 | 39.1 |
| 0.1 | 96.5 | 85.7 | 70.7 | 62.0 | 82.6 | 71.3 | 81.1 | 63.1 | 67.9 | 60.3 |
| 0.0 | 104.1 | 93.5 | 81.4 | 85.9 | 91.2 | 91.2 | 88.7 | 81.5 | 95.3 | 80.3 |
| 0.0 | 116.2 | 115.7 | 105.0 | 93.9 | 98.2 | 88.1 | 94.8 | 89.1 | 88.9 | 91.3 |
| 0.0 | 120.4 | 97.5 | 109.9 | 97.6 | 101.5 | 98.3 | 98.2 | 97.4 | 100.2 | 90.8 |
| 0.0 | 109.0 | 94.1 | 106.2 | 100.8 | 102.8 | 97.6 | 104.9 | 97.8 | 96.8 | 91.6 |
| 0.0 | 109.3 | 98.0 | 108.5 | 92.8 | 112.4 | 108.9 | 99.4 | 96.0 | 96.0 | 99.7 |

| | | | |
|---|---|---|---|
| nM | WV-6764 | WV-6765 | WV-2477 |

| | | | | | | |
|---|---|---|---|---|---|---|
| 30.0 | 16.2 | 20.4 | 15.8 | 12.5 | 96.7 | 84.3 |
| 10.0 | 29.7 | 32.1 | 24.5 | 25.0 | 97.4 | 101.1 |
| 3.3 | 31.2 | 31.9 | 33.1 | 28.8 | 100.1 | 103.7 |
| 1.1 | 46.9 | 36.7 | 43.6 | 42.9 | 112.0 | 104.5 |
| 0.4 | 79.7 | 65.9 | 77.0 | 68.1 | 115.1 | 110.4 |
| 0.1 | 93.1 | 90.4 | 90.1 | 87.7 | 110.1 | 103.6 |
| 0.0 | 100.2 | 99.0 | 108.1 | 105.5 | 98.5 | 105.1 |
| 0.0 | 107.7 | 98.1 | 110.5 | 96.4 | 106.7 | 108.2 |
| 0.0 | 105.2 | 98.4 | 96.8 | 105.4 | 101.7 | 103.6 |
| 0.0 | 98.1 | 99.0 | 88.3 | 97.9 | 95.4 | 101.5 |
| 0.0 | 96.0 | 92.9 | 91.8 | 98.7 | 93.1 | 99.9 |

[1761] Table 40. Table 40 shows the in vivo potency for different single-stranded RNAi agents, which target APOC3: WV-4161, WV-3122, WV-6766, and WV-3247. Oligonucleotides were prepared in a LNP (lipid nanoparticle).

TABLE 40
Activity of APOC3 oligonucleotides.

| PBS | LNP-4161 | LNP-3122 | LNP-6766 | LNP-3247 |
|---|---|---|---|---|
| 59.44 | 102.24 | 31.05 | 30.68 | 9.78 |
| 149.41 | 79.13 | 150.39 | 27.9 | 7.44 |
| 128.09 | 46.99 | 52.1 | 17.64 | 45.69 |
| 109.48 | 71.57 | 97.15 | 56.76 | 15.48 |
| 53.59 | 55.19 | 33.26 | 18.76 | 21.88 |

Numbers indicate % APOC3 mRNA remaining (hAPOC3/mHPRT), wherein 59.44 in the first column, second row, indicates 59.44% mRNA remaining. Animals were treated 2×10mpk. Oligonucleotides comprise, at the 5′ end, a OH (WV-4161), 5′-phosphate (PO) (WV-3122), or 5′-vinyl phosphonate (WV-6766 and WV-3247). Various oligonucleotides comprise different patterns of PO or PS in the post-seed region, and a 2′-deoxy T at the penultimate nucleotide.

[1762] Table 41. Table 41 shows the in vivo potency for different LNP formulated single-stranded RNAi agents, which target APOC3: WV-4161, WV-3122, WV-6766, and WV-3247.

### Dose: IV 2×10 mpk on Day 1 and Day 4.

TABLE 41
Activity of APOC3 oligonucleotides.

| Day | PBS | | | | | | | | | |
|---|---|---|---|---|---|---|---|---|---|---|
| 1 | 12.92 | 14.05 | 10 | 9.94 | 7.03 | 6.87 | 6.95 | 7.08 | 9.71 | 12 |
| 8 | 11.5 | 11.57 | 7.43 | 7.54 | 6.57 | 8.28 | 5.21 | 4.69 | 10.45 | 10.44 |
| 15 | 9.53 | 12.67 | 8.22 | 6.62 | 6.9 | 8.81 | 2.29 | 2.29 | 6.95 | 9.15 |
| Day | LNP-4161 | | | | | | | | | |
| 1 | 5.35 | 5.81 | 7.35 | 9.29 | 9.75 | 11.5 | 9.82 | 6.01 | 12.54 | 11.65 |
| 8 | 1.8 | 2.22 | 0.25 | 0.32 | 2.48 | 2.55 | 0.98 | 1.02 | 5.27 | 4.48 |
| 15 | 1.12 | 1.44 | 0.08 | 0.08 | 0.91 | 1.21 | 4.54 | 4.52 | 5.77 | 4.69 |
| Day | LNP-3122 | | | | | | | | | |
| 1 | 4.59 | 4.3 | 7.22 | 7.02 | 6.56 | 8.9 | 8.57 | 9.56 | 8.4 | 12.04 |
| 8 | 2.78 | 2.64 | 3.23 | 3.17 | 2.64 | 2.7 | 5.46 | 4.99 | 5.79 | 5.69 |
| 15 | 0.27 | 0.23 | 3.5 | 2.97 | 0.88 | 0.91 | 3.26 | 3.58 | 0.74 | 0.86 |
| Day | LNP-6766 | | | | | | | | | |
| 1 | 6.75 | 9.24 | 7.22 | 8.83 | 5.47 | 5.19 | 10.39 | 11.88 | 9.07 | 11.14 |
| 8 | 3.98 | 0.14 | 3.14 | 3.05 | 0.48 | 0.5 | 6.15 | 4.91 | 3.96 | 3.07 |
| 15 | 1.62 | 1.89 | 1.43 | 1.48 | 0.63 | 0.59 | 4.17 | 3.42 | 1.6 | 1.62 |
| Day | LNP-3247 | | | | | | | | | |
| 1 | 9.35 | 9.46 | 9.7 | 11.82 | 10.27 | 11.21 | 8.4 | 9.58 | 10.07 | 7.91 |
| 8 | 4.32 | 3.37 | 5.38 | 5.35 | 5.09 | 6.11 | 4.39 | 4.67 | 7.3 | 5.85 |
| 15 | 0.88 | 0.85 | 0.43 | 0.48 | 1.11 | 1.17 | 0.34 | 0.38 | 3.75 | 3.22 |

Serum hApoC3 Protein.

[1764] Table 42. Table 42 shows the in vivo potency, measured by changes in triglyceride levels, for different different LNP formulated single-stranded RNAi agents, which target APOC3: WV-4161, WV-3122, WV-6766, and WV-3247.

TABLE 42
Activity of APOC3 oligonucleotides.

| | PBS | | | | | LNP-4161 | | | | |
|---|---|---|---|---|---|---|---|---|---|---|
| 1 | 150.15 | 103.35 | 93.6 | 100.1 | 114.4 | 39 | 78 | 134.55 | 59.8 | 160.55 |
| 8 | 18.85 | 95.55 | 81.9 | 76.05 | 89.05 | 22.1 | −2.6 | 78 | 3.25 | 82.55 |
| 15 | 124.15 | 78 | 195.65 | 37.05 | 118.3 | 11.05 | −8.45 | 48.1 | 34.45 | 40.95 |

| | LNP-3122 | | | | | LNP-6766 | | | | |
|---|---|---|---|---|---|---|---|---|---|---|
| 1 | 53.95 | 74.1 | 104.65 | 83.85 | 81.9 | 118.3 | 78.65 | 42.25 | 130.65 | 94.9 |
| 8 | 29.25 | 49.4 | 71.5 | 56.55 | 63.7 | 98.8 | 34.45 | −1.3 | 74.1 | 68.9 |
| 15 | 17.55 | 45.5 | −1.95 | 30.55 | 3.9 | 92.3 | 22.1 | −1.3 | 61.1 | 37.7 |

| | LNP-3247 | | | | |
|---|---|---|---|---|---|
| 1 | 102.05 | 68.9 | 48.1 | 124.15 | 39 |
| 8 | 53.3 | 79.3 | 58.5 | 133.25 | 66.95 |
| 15 | 13.65 | −6.5 | 1.3 | 28.6 | 94.9 |

### Serum Triglycerides.

[1765] Additional experiments demonstrated the in vitro activity of different single-stranded RNAi agents, which target APOC3. In one experiment, oligonucleotides WV-5291, WV-6764, and WV-6765 all demonstrated substantial and substantially identical activity in vitro (data not shown). In another experiment, oligonucleotides WV-5290, WV-6431, and WV-6763 all demonstrated substantial and substantially identical activity in vitro (data not shown).

[1766] Table 45. Table 45 shows the stability after incubation in rat liver homogenate (24 h) for different single-stranded RNAi agents, which target APOC3: WV-2817, WV-5288, WV-5290, WV-6763, WV-6431, WV-3242, WV-5289, WV-5291, WV-6765, and WV-6764; and Table 45B, WV-1307, WV-1308. The various oligonucleotides differ in length and stereochemistry; in some oligonucleotides, several internucleotidic linkages are stereorandom phosphorothioates; in various oligonucleotides, stereorandom phosphorothioates and/or phosphodiesters are replaced by a phosphorothioate in the Sp configuration.

TABLE 45
Stability of APOC3 oligonucleotides.

| | Percentage of Full-Length |
|---|---|
| | Oligonucleotide at 24 Hr In Rat Liver |
| Oligonucleotide | Homogenate (approximate numbers) |
| WV-2817 | 4 |
| WV-5288 | 11 |
| WV-5290 | 16 |
| WV-6763 | 43 |
| WV-6431 | 73 |
| WV-3242 | 3 |
| WV-5289 | 8 |
| WV-5291 | 9 |
| WV-6765 | 26 |
| WV-6764 | 61 |

Numbers are approximate (2%).

[1767] In one experiment, oligonucleotides WV-1307 and 1308 were both tested for their ability to knockdown APOC3 mRNA levels in vitro; both were capable of mediating knockdown of APOC3 mRNA levels in vitro. WV-1307 and WV-1308 differ in their pattern of 2′-F and 2′-OMe modifications.

[1768] Table 46. Tables 46A to 46N shows the in vitro potency of various oligonucleotides.

[1769] Table 46A shows the in vitro potency of various oligonucleotides in a single-stranded RNAi agent assay; oligonucleotides were derived from strong ASOs, medium ASOs, weak ASOs, dsRNAi agents, or ssRNA.

TABLE 46A
Activity of oligonucleotides.

ssRNAs

| derived | IC50 of APOC3 ssRNAi agents | | | | | | | | | | | |
|---|---|---|---|---|---|---|---|---|---|---|---|---|
| from: | chemistry #2 | | | | chemistry #4 | | | | chemistry #6 | | | |
| strong ASO | 25 | 15 | 6.2 | 4 | 4 | 6.2 | 1.3 | 1.6 | 15 | 15.5 | 15.9 | 1.6 |
| medium ASO | 6.2 | 6.8 | 4 | 15 | 1.6 | 1.2 | 4 | 15 | 1.6 | 4 | 4.8 | 15 |
| weak ASO | 100 | 102 | 25 | 103 | 110 | 15 | 12 | 95 | 120 | 95 | 15 | 110 |
| dsRNA | 100 | | | | 101 | | | | 102 | | | |
| ssRNA | 25 | 100 | | | 1.6 | 30 | | | 15 | 20 | | |

Numbers represent IC50 (nM) of various APOC3 ssRNAi agents derived from strong, medium and weak ASOs (generally operating from a RNaseH mechanism), or derived from dsRNA or ssRNA (generally operating from a RISC-mediated mechanism).
Chemistry #2 has a 5′ PO and a pattern of 2′ modifications of fmfmfmfmfmfmfmfmfmfmm, wherein f is 2′-F and m is 2′-OMe, and a backbone pattern which is all 0, where 0 is PO.
Chemistry #4 has a 5′ PO and a pattern of 2′ modifications of fmfmfmfmfmfmfmfmfmfmm, wherein f is 2′-F and m is 2′-OMe, and a backbone pattern which is XOXOXOXOXOXOXOXOXOXO, where X is stereorandom PS and O is PO.
Chemistry #6 has a 5′ PO and a pattern of 2′ modifications of fmfmfmfmfmfmfmfmfmfmm, wherein f is 2′-F and m is 2′-OMe, and a backbone pattern which is OOOOOOOOOOOOOXXXXXXX, where X is stereorandom PS and O is PO.
The data show that single-stranded RNAi agents derived from double-stranded RNAi agents were generally not efficacious, and generally had lower activity than ssRNAi agents derived from strong ASOs which mediate knockdown via a RNaseH-mediated mechanism (e.g., WV-1275 and WV-1277).

[1770] Various ssRNAi agents to APOC3 were constructed which had various 5′ ends.

These 5′ ends include:

[chemical structure]

The term 5′-Me generically includes 5′-(S)-Me [or 5MS or S(c)] and 5′-(R)-Me [or 5MR or R(c)]. 5MSdT is the same as 5′-(S)-Me OH T. PO5MSdT is the same as 5′-(S)-Me PO T. PH5MSdT is the same as 5′-(S)-Me PH T. PS5MSdT is the same as 5′-(S)-Me PS T. 5MRdT is the same as 5′-(R)-Me OH T. PO5MRdT is the same as 5′-(R)-Me PO T. PH5MRdT is the same as 5′-(R)-Me PH T. PS5MRdT is the same as 5′-(R)-Me PS T. 5-Me indicates a moiety which is 5′-(R)-Me, 5′-(S)-Me or 5′-Me which is stereorandom.

[1771] Tested oligonucleotides having any of these various 5′ ends include: WV-7635, WV-7637, WV-7639, WV-7641, WV-7643, WV-7645, WV-7647, WV-7649, WV-6439, WV-7636, WV-7638, WV-7640, WV-7642, WV-7542, WV-7644, WV-7646, WV-7648, WV-7650, and WV-7542; detailed descriptions of these oligonucleotides can be found in Table 1A.

[1772] Activity of these various ssRNAi agents is shown in Tables 2A, 2B, 2C and 2D.

[1773] Various hybrid oligonucleotides were constructed. Without wishing to be bound by any particular theory, the present disclosure suggests that, in at least some cases, a hybrid oligonucleotide comprises a structure suitable for an APOC3 oligonucleotide which operates via a RNaseH-mediated mechanism, e.g., a contiguous stretch of nucleotides which are 2′-deoxy, and also a structure suitable for an APOC3 oligonucleotide which operates via a RISC-mediated mechanism, such as a seed region; and the present disclosure suggests that, in at least some cases, a hybrid oligonucleotide is capable of knocking down gene expression via a RNaseH-mediated and/or a RISC-mediated mechanism. Hybrid oligonucleotides constructed include: WV-7523, WV-7525, WV-7527, WV-7524, WV-7526, and WV-7528. These oligonucleotides were tested in vitro for ability to knockdown gene expression in comparison with oligonucleotides including: WV-7672, WV-7521, WV-6763, WV-6431, WV-6439, WV-7673, WV-7522, WV-6765, WV-6764, and WV-6439. The results are shown in the Tables 46H and 461, below.

TABLE 46H
Activity of Oligonucleotides.

| Conc (exp | | | | | | | | |
|---|---|---|---|---|---|---|---|---|
| 10) (nM) | WV-7672 | | WV-7521 | | WV-7523 | | WV-7525 | |
| 1.000 | 0.243 | 0.150 | 0.231 | 0.230 | 0.214 | 0.208 | 0.267 | 0.227 |
| 0.523 | 0.204 | 0.173 | 0.315 | 0.254 | 0.293 | 0.278 | 0.336 | 0.227 |
| 0.046 | 0.273 | 0.237 | 0.495 | 0.382 | 0.511 | 0.477 | 0.497 | 0.383 |
| −0.431 | 0.580 | 0.347 | 0.769 | 0.656 | 0.773 | 0.629 | 0.583 | 0.539 |
| −0.908 | 0.782 | 0.790 | 1.054 | 0.926 | 1.305 | 1.151 | 0.908 | 0.852 |
| −1.386 | 1.042 | 1.093 | 0.925 | 1.451 | 1.258 | 1.191 | 1.100 | 1.057 |
| −1.863 | 1.141 | 1.144 | 1.057 | 1.096 | 1.046 | 1.382 | 1.346 | 1.172 |
| −2.340 | 1.040 | 1.120 | 1.025 | 1.405 | 1.119 | 1.218 | 1.208 | 1.305 |
| −2.817 | 1.023 | 0.937 | 1.022 | 1.028 | 0.882 | 1.114 | 1.080 | 1.071 |
| −3.294 | 1.045 | 1.266 | 1.062 | 1.199 | 1.050 | 1.187 | 0.980 | 1.072 |
| −3.771 | 1.072 | 0.984 | 0.928 | 1.026 | 1.023 | 1.005 | 0.941 | 1.079 |

| Conc (exp | | | | | | | | |
|---|---|---|---|---|---|---|---|---|
| 10) (nM) | WV-7527 | | WV-6763 | | WV-6431 | | WV-6439 (Control) | |
| 1.000 | 0.379 | 0.373 | 0.225 | 0.250 | 0.288 | 0.255 | 0.224 | 0.209 |
| 0.523 | 0.500 | 0.428 | 0.269 | 0.218 | 0.209 | 0.207 | 0.207 | 0.148 |
| 0.046 | 0.736 | 0.617 | 0.221 | 0.164 | 0.224 | 0.183 | 0.226 | 0.217 |
| −0.431 | 1.018 | 0.958 | 0.247 | 0.178 | 0.269 | 0.224 | 0.504 | 0.402 |
| −0.908 | 0.938 | 1.231 | 0.351 | 0.269 | 0.472 | 0.406 | 0.642 | 0.653 |
| −1.386 | 1.231 | 1.326 | 0.531 | 0.489 | 0.719 | 0.768 | 0.937 | 0.959 |
| −1.863 | 1.208 | 1.383 | 0.790 | 0.649 | 0.838 | 0.961 | 1.148 | 1.205 |
| −2.340 | 1.136 | 1.162 | 0.873 | 0.881 | 1.321 | 1.136 | 1.127 | 1.035 |
| −2.817 | 1.106 | 1.084 | 1.080 | 0.962 | 1.119 | 1.311 | 1.141 | 1.035 |
| −3.294 | 0.961 | 1.132 | 1.124 | 1.101 | 0.985 | 1.270 | 0.984 | 0.972 |
| −3.771 | 1.073 | 1.203 | 1.164 | 0.936 | 1.059 | 1.309 | 0.968 | 0.871 |

TABLE 46I
Activity of oligonucleotides.

| Conc (exp | | | | | | | | |
|---|---|---|---|---|---|---|---|---|
| 10) (nM) | WV-7673 | | WV-7522 | | WV-7524 | | WV-7526 | |
| 1.000 | 0.126 | 0.091 | 0.276 | 0.194 | 0.206 | 0.176 | 0.268 | 0.173 |
| 0.523 | 0.191 | 0.105 | 0.352 | 0.256 | 0.383 | 0.315 | 0.381 | 0.250 |
| 0.046 | 0.283 | 0.193 | 0.620 | 0.435 | 0.643 | 0.505 | 0.588 | 0.474 |
| −0.431 | 0.484 | 0.382 | 0.846 | 0.608 | 0.910 | 0.558 | 0.648 | 0.626 |
| −0.908 | 0.804 | 0.717 | 1.041 | 1.143 | 1.085 | 0.992 | 1.154 | 0.951 |
| −1.386 | 1.169 | 0.965 | 1.196 | 1.176 | 1.169 | 1.074 | 1.199 | 1.263 |
| −1.863 | 1.136 | 1.120 | 1.217 | 1.116 | 1.173 | 1.336 | 1.242 | 1.312 |
| −2.340 | 1.136 | 1.475 | 1.224 | 1.565 | 1.140 | 1.716 | 1.162 | 1.095 |
| −2.817 | 0.901 | 0.962 | 1.060 | 1.074 | 1.151 | 1.120 | 1.136 | 1.104 |
| −3.294 | 1.023 | 1.255 | 1.035 | 1.367 | 1.137 | 1.228 | 1.148 | 1.036 |
| −3.771 | 1.022 | 1.017 | 0.925 | 0.984 | 1.094 | 0.963 | 0.993 | 0.947 |

| Conc (exp | | | | | | | | |
|---|---|---|---|---|---|---|---|---|
| 10) (nM) | WV-7528 | | WV-6765 | | WV-6764 | | WV-6439 (Control) | |
| 1.000 | 0.349 | 0.281 | 0.156 | 0.086 | 0.088 | 0.061 | 0.220 | 0.194 |
| 0.523 | 0.473 | 0.372 | 0.220 | 0.143 | 0.186 | 0.119 | 0.225 | 0.149 |
| 0.046 | 0.697 | 0.550 | 0.303 | 0.143 | 0.304 | 0.168 | 0.276 | 0.193 |
| −0.431 | 0.862 | 0.836 | 0.488 | 0.396 | 0.400 | 0.293 | 0.440 | 0.310 |
| −0.908 | 1.083 | 1.087 | 0.776 | 0.566 | 0.812 | 0.601 | 0.735 | 0.585 |
| −1.386 | 1.401 | 1.156 | 1.197 | 0.851 | 1.100 | 0.911 | 0.990 | 0.876 |
| −1.863 | 1.262 | 1.242 | 1.121 | 1.196 | 1.233 | 1.129 | 1.211 | 1.047 |
| −2.340 | 1.786 | 1.213 | 1.221 | 1.027 | 1.301 | 1.303 | 1.226 | 1.082 |
| −2.817 | 1.183 | 1.042 | 1.059 | 1.132 | 1.220 | 1.010 | 1.191 | 1.021 |
| −3.294 | 1.073 | 1.190 | 1.024 | 1.315 | 1.048 | 1.247 | 1.123 | 1.066 |
| −3.771 | 0.943 | 1.065 | 1.094 | 1.033 | 1.146 | 1.042 | 0.968 | 0.880 |

[1774] Tables 46J and 46K show in vitro efficacy of various oligonucleotides in Hep3B cells. Various oligonucleotides comprise stereorandom phosphorothioates or sterecontrolled phosphorothioates.

TABLE 46J
Activity of oligonucleotides.

| Conc (exp | | | | | | | | |
|---|---|---|---|---|---|---|---|---|
| 10) (nM) | WV-7672 | | WV-7521 | | WV-7523 | | WV-7525 | |
| 1.000 | 0.243 | 0.150 | 0.231 | 0.230 | 0.214 | 0.208 | 0.267 | 0.227 |
| 0.523 | 0.204 | 0.173 | 0.315 | 0.254 | 0.293 | 0.278 | 0.336 | 0.227 |
| 0.046 | 0.273 | 0.237 | 0.495 | 0.382 | 0.511 | 0.477 | 0.497 | 0.383 |
| −0.431 | 0.580 | 0.347 | 0.769 | 0.656 | 0.773 | 0.629 | 0.583 | 0.539 |
| −0.908 | 0.782 | 0.790 | 1.054 | 0.926 | 1.305 | 1.151 | 0.908 | 0.852 |
| −1.386 | 1.042 | 1.093 | 0.925 | 1.451 | 1.258 | 1.191 | 1.100 | 1.057 |
| −1.863 | 1.141 | 1.144 | 1.057 | 1.096 | 1.046 | 1.382 | 1.346 | 1.172 |
| −2.340 | 1.040 | 1.120 | 1.025 | 1.405 | 1.119 | 1.218 | 1.208 | 1.305 |
| −2.817 | 1.023 | 0.937 | 1.022 | 1.028 | 0.882 | 1.114 | 1.080 | 1.071 |
| −3.294 | 1.045 | 1.266 | 1.062 | 1.199 | 1.050 | 1.187 | 0.980 | 1.072 |
| −3.771 | 1.072 | 0.984 | 0.928 | 1.026 | 1.023 | 1.005 | 0.941 | 1.079 |

| Conc (exp | | | | | | | | |
|---|---|---|---|---|---|---|---|---|
| 10) (nM) | WV-7527 | | WV-6763 | | WV-6431 | | WV-6439 (Control) | |
| 1.000 | 0.379 | 0.373 | 0.225 | 0.250 | 0.288 | 0.255 | 0.224 | 0.209 |
| 0.523 | 0.500 | 0.428 | 0.269 | 0.218 | 0.209 | 0.207 | 0.207 | 0.148 |
| 0.046 | 0.736 | 0.617 | 0.221 | 0.164 | 0.224 | 0.183 | 0.226 | 0.217 |
| −0.431 | 1.018 | 0.958 | 0.247 | 0.178 | 0.269 | 0.224 | 0.504 | 0.402 |
| −0.908 | 0.938 | 1.231 | 0.351 | 0.269 | 0.472 | 0.406 | 0.642 | 0.653 |
| −1.386 | 1.231 | 1.326 | 0.531 | 0.489 | 0.719 | 0.768 | 0.937 | 0.959 |
| −1.863 | 1.208 | 1.383 | 0.790 | 0.649 | 0.838 | 0.961 | 1.148 | 1.205 |
| −2.340 | 1.136 | 1.162 | 0.873 | 0.881 | 1.321 | 1.136 | 1.127 | 1.035 |
| −2.817 | 1.106 | 1.084 | 1.080 | 0.962 | 1.119 | 1.311 | 1.141 | 1.035 |
| −3.294 | 0.961 | 1.132 | 1.124 | 1.101 | 0.985 | 1.270 | 0.984 | 0.972 |
| −3.771 | 1.073 | 1.203 | 1.164 | 0.936 | 1.059 | 1.309 | 0.968 | 0.871 |

TABLE 46K
Activity of oligonucleotides.

| Conc (exp | | | | | | | | |
|---|---|---|---|---|---|---|---|---|
| 10) (nM) | WV-7673 | | WV-7522 | | WV-7524 | | WV-7526 | |
| 1.000 | 0.126 | 0.091 | 0.276 | 0.194 | 0.206 | 0.176 | 0.268 | 0.173 |
| 0.523 | 0.191 | 0.105 | 0.352 | 0.256 | 0.383 | 0.315 | 0.381 | 0.250 |
| 0.046 | 0.283 | 0.193 | 0.620 | 0.435 | 0.643 | 0.505 | 0.588 | 0.474 |
| −0.431 | 0.484 | 0.382 | 0.846 | 0.608 | 0.910 | 0.558 | 0.648 | 0.626 |
| −0.908 | 0.804 | 0.717 | 1.041 | 1.143 | 1.085 | 0.992 | 1.154 | 0.951 |
| −1.386 | 1.169 | 0.965 | 1.196 | 1.176 | 1.169 | 1.074 | 1.199 | 1.263 |
| −1.863 | 1.136 | 1.120 | 1.217 | 1.116 | 1.173 | 1.336 | 1.242 | 1.312 |
| −2.340 | 1.136 | 1.475 | 1.224 | 1.565 | 1.140 | 1.716 | 1.162 | 1.095 |
| −2.817 | 0.901 | 0.962 | 1.060 | 1.074 | 1.151 | 1.120 | 1.136 | 1.104 |
| −3.294 | 1.023 | 1.255 | 1.035 | 1.367 | 1.137 | 1.228 | 1.148 | 1.036 |
| −3.771 | 1.022 | 1.017 | 0.925 | 0.984 | 1.094 | 0.963 | 0.993 | 0.947 |

| Conc (exp | | | | | | | | |
|---|---|---|---|---|---|---|---|---|
| 10) (nM) | WV-7528 | | WV-6765 | | WV-6764 | | WV-6439 (Control) | |
| 1.000 | 0.349 | 0.281 | 0.156 | 0.086 | 0.088 | 0.061 | 0.220 | 0.194 |
| 0.523 | 0.473 | 0.372 | 0.220 | 0.143 | 0.186 | 0.119 | 0.225 | 0.149 |
| 0.046 | 0.697 | 0.550 | 0.303 | 0.143 | 0.304 | 0.168 | 0.276 | 0.193 |
| −0.431 | 0.862 | 0.836 | 0.488 | 0.396 | 0.400 | 0.293 | 0.440 | 0.310 |
| −0.908 | 1.083 | 1.087 | 0.776 | 0.566 | 0.812 | 0.601 | 0.735 | 0.585 |
| −1.386 | 1.401 | 1.156 | 1.197 | 0.851 | 1.100 | 0.911 | 0.990 | 0.876 |
| −1.863 | 1.262 | 1.242 | 1.121 | 1.196 | 1.233 | 1.129 | 1.211 | 1.047 |
| −2.340 | 1.786 | 1.213 | 1.221 | 1.027 | 1.301 | 1.303 | 1.226 | 1.082 |
| −2.817 | 1.183 | 1.042 | 1.059 | 1.132 | 1.220 | 1.010 | 1.191 | 1.021 |
| −3.294 | 1.073 | 1.190 | 1.024 | 1.315 | 1.048 | 1.247 | 1.123 | 1.066 |
| −3.771 | 0.943 | 1.065 | 1.094 | 1.033 | 1.146 | 1.042 | 0.968 | 0.880 |

[1775] Tables 46M and 46N show in vitro efficacy of various oligonucleotides in Hep3B cells. Tested oligonucleotides were: WV-6439, WV-7540, WV-7541, WV-7542, WV-7543, and WV-7544. Various oligonucleotides comprise a seed region which has a pattern of 2′-modifications of alternating 2′-F and 2′-OMe; a pattern with an initial 2′-F followed by 2′-OME; or a pattern of all 2′-OMe.

TABLE 46M
Activity of oligonucleotides.

| | | | |
|---|---|---|---|
| Conc (exp | | | |
| 10) (nM) | WV-6439 | WV-7540 | WV-7541 |

| | | | | | | |
|---|---|---|---|---|---|---|
| 1 | 0.173 | 0.264 | 0.144 | 0.254 | 0.266 | 0.352 |
| 0.523 | 0.124 | 0.169 | 0.192 | 0.235 | 0.42 | 0.558 |
| 0.046 | 0.171 | 0.234 | 0.245 | 0.37 | 0.613 | 0.785 |
| −0.431 | 0.379 | 0.346 | 0.436 | 0.488 | 0.785 | 0.997 |
| −0.908 | 0.658 | 0.507 | 0.772 | 0.943 | 0.941 | 1.233 |
| −1.386 | 0.791 | 0.823 | 1.196 | 0.982 | 1.119 | 1.043 |
| −1.863 | 0.901 | 0.903 | 1.053 | 1.073 | 1.099 | 1.165 |
| −2.34 | 0.956 | 0.949 | 1.031 | 1.197 | 0.975 | 1.296 |
| −2.817 | 1.006 | 0.983 | 1.099 | 1.123 | 1.112 | 0.966 |
| −3.294 | 1.034 | 0.959 | 1.014 | 0.969 | 0.994 | 1.045 |

TABLE 46N
Activity of oligonucleotides.

| Conc | | | | | | |
|---|---|---|---|---|---|---|
| (exp | | | | | | |
| 10) | | | | | | |
| (nM) | WV-7542 | | WV-7543 | | WV-7544 | |
| 1 | 0.043 | 0.104 | 0.090 | 0.150 | 0.128 | 0.188 |
| 0.523 | 0.082 | 0.156 | 0.143 | 0.249 | 0.236 | 0.417 |
| 0.046 | 0.168 | 0.257 | 0.223 | 0.365 | 0.402 | 0.756 |
| −0.431 | 0.367 | 0.462 | 0.368 | 0.797 | 0.697 | 1.024 |
| −0.908 | 0.552 | 0.854 | 0.601 | 0.968 | 0.858 | 1.094 |
| −1.386 | 0.959 | 1.046 | 0.879 | 1.327 | 0.975 | 1.121 |
| −1.863 | 0.919 | 1.233 | 1.021 | 1.341 | 1.003 | 1.101 |
| −2.34 | 1.157 | | 1.185 | 1.150 | 1.054 | 1.351 |
| −2.817 | 1.064 | 1.297 | 1.136 | 1.064 | 1.104 | 0.956 |
| −3.294 | 1.013 | 0.993 | 0.975 | 0.946 | 0.914 | 0.919 |

[1776] As shown in Table 47, additional single-stranded RNAi agents to APOC3 were tested.

TABLE 47A
Activity of APOC3 oligonucleotides.

| Control | | WV-1868 | | WV-2110 | | WV-2388 | | WV-2111 | | WV-2389 | |
|---|---|---|---|---|---|---|---|---|---|---|---|
| 0.99 | 1.02 | 0.52 | 0.57 | 0.33 | 0.39 | 0.43 | 0.49 | 0.55 | 0.43 | 0.59 | 0.62 |

Numbers represent relative residual APOC3 mRNA level after oligonucleotide treatment (400 pM). The number 1 would represent 100% APOC3 mRNA level (relative to control); 0 would represent 0% APOC3 mRNA level or 100% knockdown. WV-2111 and WV-2389 have a hybrid format.

TABLE 47B
Activity of APOC3 oligonucleotides.

| Conc.(nM) | | | | | | |
|---|---|---|---|---|---|---|
| (exp 10) | WV-2113 | | WV-2148 | | WV-2149 | |
| 1.398 | 0.03 | 0.02 | 0.01 | 0.01 | 0.02 | 0.02 |
| 0.792 | 0.15 | 0.14 | 0.04 | 0.02 | 0.07 | 0.04 |
| 0.204 | 0.44 | 0.46 | 0.28 | 0.22 | 0.34 | 0.30 |
| −0.398 | 0.71 | 0.75 | 0.54 | 0.51 | 0.71 | 0.53 |
| −1.000 | 0.87 | 0.88 | 0.78 | 0.63 | 0.75 | 0.58 |
| −1.602 | 0.82 | 0.99 | 0.67 | 1.09 | 0.79 | 0.93 |
| −2.204 | 0.92 | 1.13 | 0.83 | 0.71 | 0.83 | 0.76 |
| −2.824 | 0.99 | 1.22 | 1.02 | 0.87 | 0.89 | 0.78 |

TABLE 47C
IC50 of various APOC3 oligonucleotides.

| Oligonucleotide | IC 50 (pM) |
|---|---|
| WV-1308 | 102 |
| WV-1308 | 144 |
| WV-1868 | 266 |
| WV-2110 | 64 |
| WV-2110 | 64 |
| WV-2111 | 163 |
| WV-2111 | 163 |
| WV-2114 | 705 |
| WV-2114 | 628 |
| WV-2150 | 70 |
| WV-2151 | 87 |
| WV-2152 | 427 |
| WV-2153 | 371 |
| WV-2154 | 120 |
| WV-2155 | 74 |
| WV-2156 | 118 |
| WV-2157 | 245 |

WV-2114, WV-2152, and WV-2153 have a hybrid format. Oligonucleotides which are repeated with different numbers indicate different replicates or experiments.

TABLE 47D
Activity of APOC3 oligonucleotides.

| | | | |
|---|---|---|---|
| Conc (exp | | | |
| 10) nM | WV-7540 | WV-8427 | WV-8429 |

| | | | | | | |
|---|---|---|---|---|---|---|
| 1.00 | 0.13 | 0.15 | 0.20 | 0.17 | 0.14 | 0.15 |
| 0.52 | 0.16 | 0.25 | 0.22 | 0.26 | 0.15 | 0.19 |
| 0.05 | 0.27 | 0.32 | 0.37 | 0.35 | 0.26 | 0.22 |
| −0.43 | 0.40 | 0.47 | 0.40 | 0.54 | 0.28 | 0.30 |
| −0.91 | 0.56 | 0.64 | 0.63 | 0.71 | 0.45 | 0.49 |
| −1.39 | 0.69 | 0.80 | 0.80 | 0.92 | 0.61 | 0.71 |
| −1.86 | 0.73 | 0.92 | 0.91 | 0.97 | 0.79 | 0.96 |
| −2.34 | 0.69 | 0.84 | 1.00 | 0.98 | 1.01 | 0.95 |
| −2.82 | 0.72 | 0.92 | 1.00 | 1.04 | 0.95 | 1.01 |
| −3.29 | 0.77 | 1.34 | 0.91 | 1.60 | 0.97 | 0.95 |
| −3.77 | 0.64 | 1.05 | 0.88 | 1.25 | 1.31 | 0.96 |

| | | | |
|---|---|---|---|
| 1.00 | WV-8431 | WV-6439 | WV-6439 |

| | | | | | | |
|---|---|---|---|---|---|---|
| 0.52 | 0.17 | 0.17 | 0.21 | 0.21 | 0.19 | 0.19 |
| 0.05 | 0.21 | 0.21 | 0.17 | 0.17 | 0.18 | 0.18 |
| −0.43 | 0.23 | 0.23 | 0.22 | 0.22 | 0.19 | 0.19 |
| −0.91 | 0.29 | 0.29 | 0.23 | 0.23 | 0.27 | 0.27 |
| −1.39 | 0.49 | 0.49 | 0.52 | 0.52 | 0.40 | 0.40 |
| −1.86 | 0.75 | 0.75 | 0.74 | 0.74 | 0.57 | 0.57 |
| −2.34 | 0.90 | 0.90 | 0.91 | 0.91 | 0.70 | 0.70 |
| −2.82 | 1.00 | 1.00 | 0.99 | 0.99 | 0.80 | 0.80 |
| −3.29 | 1.06 | 1.06 | 1.05 | 1.05 | 0.94 | 0.94 |
| −3.77 | 1.12 | 1.12 | 0.95 | 0.95 | 0.98 | 0.98 |

| | | |
|---|---|---|
| 1.00 | WV-6431 | WV-6439 Plate Control |

| | | | | |
|---|---|---|---|---|
| 0.52 | 0.21 | 0.21 | 0.20 | 0.20 |
| 0.05 | 0.28 | 0.28 | 0.21 | 0.21 |
| −0.43 | 0.18 | 0.18 | 0.23 | 0.23 |
| −0.91 | 0.23 | 0.23 | 0.29 | 0.29 |
| −1.39 | 0.41 | 0.41 | 0.54 | 0.54 |
| −1.86 | 0.67 | 0.67 | 0.67 | 0.67 |
| −2.34 | 0.73 | 0.73 | 0.75 | 0.75 |
| −2.82 | 0.85 | 0.85 | 0.85 | 0.85 |
| −3.29 | 1.05 | 1.05 | 0.77 | 0.77 |
| −3.77 | 0.90 | 0.90 | 0.86 | 0.86 |

In this and various other tables wherein the conc. of the oligonucleotide is a negative number, the negative number (e.g.,-3.77) indicates an exponent of 10 (exp10) or log.

TABLE 47E
Activity of APOC3 oligonucleotides.

| Conc (exp | | | |
|---|---|---|---|
| 10) nM | 7543 | 8428 | 8430 |

| | | | | | | |
|---|---|---|---|---|---|---|
| 1.00 | 0.18 | 0.18 | 0.18 | 0.19 | 0.24 | 0.21 |
| 0.52 | 0.24 | 0.25 | 0.20 | 0.23 | 0.33 | 0.33 |
| 0.05 | 0.39 | 0.39 | 0.37 | 0.37 | 0.46 | 0.40 |
| −0.43 | 0.57 | 0.53 | 0.49 | 0.50 | 0.65 | 0.56 |
| −0.91 | 0.68 | 0.69 | 0.76 | 0.78 | 0.84 | 0.66 |
| −1.39 | 0.88 | 0.82 | 0.88 | 0.93 | 0.91 | 0.84 |
| −1.86 | 0.93 | 0.87 | 0.94 | 1.06 | 1.13 | 0.95 |
| −2.34 | 0.94 | 0.83 | 0.99 | 1.13 | 1.18 | 0.93 |
| −2.82 | 0.99 | 0.87 | 1.00 | 1.00 | 1.01 | 0.92 |
| −3.29 | 0.95 | 0.83 | 1.01 | 1.06 | 1.16 | 1.02 |
| −3.77 | 1.11 | 0.80 | 1.00 | 1.02 | 1.03 | 0.99 |

| | | | |
|---|---|---|---|
| Conc (exp | | | |
| 10) | 8432 | 7542 | 6765 |

| | | | | | | |
|---|---|---|---|---|---|---|
| 1.00 | 0.21 | 0.20 | 0.09 | 0.14 | 0.16 | 0.17 |
| 0.52 | 0.24 | 0.25 | 0.14 | 0.15 | 0.21 | 0.21 |
| 0.05 | 0.33 | 0.36 | 0.23 | 0.27 | 0.26 | 0.25 |
| −0.43 | 0.47 | 0.55 | 0.37 | 0.40 | 0.46 | 0.38 |
| −0.91 | 0.73 | 0.71 | 0.59 | 0.63 | 0.66 | 0.66 |
| −1.39 | 0.85 | 0.86 | 0.82 | 0.85 | 0.94 | 0.82 |
| −1.86 | 0.97 | 0.95 | 0.96 | 1.09 | 0.95 | 1.04 |
| −2.34 | 1.08 | 1.06 | 1.13 | 1.53 | 0.98 | 1.02 |
| −2.82 | 0.95 | 1.10 | 1.02 | 0.92 | 0.99 | 1.11 |
| −3.29 | 1.00 | 0.99 | 1.05 | 1.46 | 0.96 | 1.07 |
| −3.77 | 0.97 | 1.08 | 1.01 | 1.20 | 0.91 | 1.02 |

| | | |
|---|---|---|
| Conc (exp | | |
| 10) | 6764 | 6439 Plate Control |

| | | | | |
|---|---|---|---|---|
| 1.00 | 0.12 | 0.13 | 0.22 | 0.20 |
| 0.52 | 0.19 | 0.23 | 0.18 | 0.16 |
| 0.05 | 0.30 | 0.32 | 0.22 | 0.22 |
| −0.43 | 0.41 | 0.47 | 0.33 | 0.41 |
| −0.91 | 0.70 | 0.83 | 0.54 | 0.69 |
| −1.39 | 0.83 | 0.87 | 0.84 | 0.85 |
| −1.86 | 0.90 | 1.08 | 1.02 | 1.04 |
| −2.34 | 1.01 | 1.06 | 0.89 | 1.00 |
| −2.82 | 1.03 | 1.02 | 1.09 | 1.08 |
| −3.29 | 0.98 | 1.46 | 0.99 | 1.17 |
| −3.77 | 1.10 | 1.06 | 1.09 | 1.04 |

TABLE 47F
Activity of APOC3 oligonucleotides.

| | 100 nM | | 25 nM | | 6.2 nM | |
|---|---|---|---|---|---|---|
| WV-1307 | 0.99619 | 0.7816 | 0.51566 | 0.47781 | 0.48785 | 0.46474 |
| WV-1308 | 0.72926 | 0.91035 | 0.32635 | 0.28411 | 0.21984 | 0.21984 |
| WV-1238 | 0.42765 | 0.63927 | 0.25962 | 0.21088 | 0.34978 | 0.25078 |
| WV-1240 | 0.3241 | 0.21531 | 0.1798 | 0.20229 | 0.36463 | 0.26325 |
| WV-1800 | 0.30239 | 0.31306 | 0.28019 | 0.18231 | 0.24392 | 0.31306 |
| WV-1801 | 0.50856 | 0.51925 | 0.73944 | 0.41596 | 0.35466 | 0.2389 |
| WV-1802 | 0.3109 | 0.23237 | 0.54506 | 0.45203 | 0.25962 | 0.22137 |
| WV-1803 | 0.3109 | 0.21531 | 0.30875 | 0.24057 | 0.14809 | 0.13346 |
| WV-1270 | 0.69472 | 0.8553 | 0.44891 | 0.34736 | 0.43663 | 0.45203 |
| WV-1272 | 0.64819 | 0.58015 | 0.40179 | 0.43663 | 0.66181 | 0.6175 |
| WV-1824 | 0.41885 | 0.57614 | 0.37488 | 0.37749 | 0.32862 | 0.54506 |
| WV-1825 | 0.48785 | 0.48785 | 0.40458 | 0.40179 | 0.38542 | 0.40179 |
| WV-1826 | 0.43062 | 0.38542 | 0.24905 | 0.33786 | 0.38011 | 0.36211 |
| WV-1827 | 0.69955 | 0.70932 | 0.37749 | 0.56039 | 0.48113 | 0.4981 |
| WV-1275 | 0.24 | 0.4 | 0.22 | 0.16 | 0.24 | 0.29 |
| WV-1277 | 0.1 | 0.11 | 0.15 | 0.1 | 0.19 | 0.24 |
| WV-1828 | 0.19405 | 0.26692 | 0.16431 | 0.14107 | 0.18874 | 0.17011 |
| WV-1829 | 0.23237 | 0.26325 | 0.2229 | 0.15762 | 0.23237 | 0.20511 |
| WV-1830 | 0.16318 | 0.19271 | 0.20654 | 0.12196 | 0.18874 | 0.16545 |
| WV-1831 | 0.13346 | 0.16431 | 0.12539 | 0.08505 | 0.15982 | 0.15225 |
| WV-1307 | 0.43 | 0.46 | 0.36 | 0.34 | 0.37 | 0.35 |
| WV-1308 | 0.28 | 0.27 | 0.11 | 0.12 | 0.16 | 0.16 |
| D73 | 0.04 | 0.03 | 0.04 | 0.03 | 0.06 | 0.06 |
| D74 | 0.02 | 0.02 | 0.02 | 0.02 | 0.07 | 0.05 |
| WV-1238 | 0.55 | 0.14 | 0.1 | 0.14 | 0.32 | 0.39 |
| WV-1240 | 0.18 | 0.18 | 0.28 | 0.24 | 0.55 | 0.5 |
| WV-1800 | 0.27 | 0.18 | 0.2 | 0.08 | 0.14 | 0.18 |
| WV-1801 | 0.58 | 0.38 | 0.34 | 0.59 | 0.25 | 0.23 |
| WV-1802 | 0.23 | 0.3 | 0.16 | 0.63 | 0.2 | 0.22 |
| WV-1803 | 0.15 | 0.19 | 0.17 | 0.14 | 0.11 | 0.13 |
| WV-1270 | 0.61 | 0.61 | 0.51 | 0.26 | 0.29 | 0.32 |
| WV-1272 | 0.49 | 0.51 | 0.42 | 0.36 | 0.51 | 0.73 |
| WV-1824 | 0.38 | 0.43 | 0.22 | 0.25 | 0.31 | 0.38 |
| WV-1825 | 0.4 | 0.33 | 0.15 | 0.4 | 0.29 | 0.32 |
| WV-1826 | 0.29 | 0.3 | 0.2 | 0.2 | 0.26 | 0.31 |
| WV-1827 | 0.97 | 0.53 | 0.46 | 0.39 | 0.44 | 0.48 |
| WV-1275 | 0.42 | 0.27 | 0.17 | 0.16 | 0.26 | 0.35 |
| WV-1277 | 0.1 | 0.08 | 0.09 | 0.09 | 0.26 | 0.28 |
| WV-1828 | 0.14 | 0.14 | 0.22 | 0.36 | 0.22 | 0.13 |
| WV-1829 | 0.2 | 0.2 | 0.14 | 0.23 | 0.14 | 0.19 |
| WV-1830 | 0.17 | 0.12 | 0.34 | 0.17 | 0.15 | 0.17 |
| WV-1831 | 0.1 | 0.11 | 0.11 | 0.07 | 0.12 | 0.14 |

Oligonucleotides were also tested at 0.4 and 1 nM and 25 and 6.2 pM, at which concentrations, the oligonucleotides showed decreased ability to knock down APOC3 relative to the higher concentrations (data not shown).

TABLE 47G
Activity of APOC3 oligonucleotides.

| Log Conc. (nM) | H2O | | WV-4186 | | WV-4255 | |
|---|---|---|---|---|---|---|
| 25 | 1.13 | 0.87 | 0.03 | 0.03 | 0.04 | 0.04 |
| 6.25 | 1.13 | 0.59 | 0.1 | 0.04 | 0.31 | 0.21 |
| 1.5625 | 0.99 | 0.71 | 0.13 | 0.08 | 0.46 | 0.4 |
| 0.390625 | 0.86 | 0.94 | 0.25 | 0.33 | 0.73 | 0.82 |
| 0.097656 | 0.68 | 0.94 | 0.7 | 0.48 | 0.92 | 1.22 |
| 0.024414 | 0.77 | 0.9 | 0.6 | 0.58 | 0.9 | 1.08 |
| 0.006104 | 0.7 | 1.28 | 0.64 | 1.6 | 0.73 | 1.39 |
| 0.001526 | 0.76 | 0.94 | 0.9 | 0.91 | 0.76 | 1.03 |
| Log Conc. (nM) | WV-4245 | | WV-4260 | | WV-4250 | |
| 25 | 0.08 | 0.07 | | 0.04 | | 0.08 |
| 6.25 | 0.31 | 0.17 | 0.3 | 0.19 | 0.24 | 0.14 |
| 1.5625 | 0.41 | 0.56 | 0.52 | 0.39 | 0.38 | 0.37 |
| 0.390625 | 0.74 | 0.84 | 0.69 | 0.79 | 0.66 | 0.6 |
| 0.097656 | 0.73 | 0.96 | 0.9 | 1 | 0.99 | 0.98 |
| 0.024414 | 0.71 | 0.8 | 0.84 | 1.05 | 0.89 | 0.98 |
| 0.006104 | 0.77 | 1.75 | 0.72 | 1.4 | 0.72 | 1.26 |
| 0.001526 | 0.74 | 1.05 | 1.15 | 1.08 | 0.74 | 1.32 |
| Log Conc. (nM) | WV-4145 | | WV-4178 | | WV-4156 | |
| 25 | | 0.02 | | 0.02 | 0.02 | |
| 6.25 | 0.18 | 0.12 | 0.33 | 0.23 | 0.2 | 0.15 |
| 1.5625 | 0.36 | 0.32 | 0.63 | 0.47 | 0.36 | 0.32 |
| 0.390625 | 0.74 | 0.7 | 0.99 | 0.89 | 0.74 | 0.85 |
| 0.097656 | 0.84 | 1.08 | 0.87 | 1.11 | 0.92 | 0.97 |
| 0.024414 | 0.66 | 1.11 | 0.83 | 0.99 | 0.86 | 1.43 |
| 0.006104 | 0.82 | 1.3 | 0.86 | 1.47 | 0.93 | 1.51 |
| 0.001526 | 0.89 | 1.23 | 0.78 | 1.2 | 0.9 | 1.08 |

| | | |
|---|---|---|
| Log Conc. (nM) | WV-4172 | WV-4149 |

| | | | | |
|---|---|---|---|---|
| 25 | | 0.07 | 0.17 | 0.1 |
| 6.25 | 0.68 | 0.39 | 0.56 | 0.49 |
| 1.5625 | 0.77 | 0.78 | 0.84 | 0.76 |
| 0.390625 | 1.19 | 1.05 | 0.81 | 0.88 |
| 0.097656 | 0.93 | 1.16 | 0.85 | 0.9 |
| 0.024414 | 1.11 | 1.2 | 0.84 | 1.19 |
| 0.006104 | 1.17 | 1.47 | 1.91 | 1.08 |
| 0.001526 | 0.78 | 1.14 | 0.79 | 1.33 |

TABLE 47H
Activity of APOC3 oligonucleotides.

| Log Conc. (nM) | 25 | 6.25 | 1.562 | 0.390 | 0.0976 | 0.0244 | 0.00610 | 0.0015 |
|---|---|---|---|---|---|---|---|---|
| H2O | 0.74 | 0.83 | 1.09 | 0.9 | 1.35 | 1.25 | 0.93 | 1.13 |
| | 1.25 | 0.92 | 0.89 | 1.1 | 0.84 | 0.96 | 1.2 | 0.84 |
| WV-4186 | 0.08 | 0.05 | 0.13 | 0.24 | 0.42 | 0.67 | 0.96 | 1.23 |
| | 0.03 | 0.05 | 0.1 | 0.25 | 0.38 | 0.7 | 1.04 | 0.7 |
| WV-4182 | 0.1 | 0.51 | 0.79 | 1.14 | 1.32 | 1.36 | 1.42 | 1.16 |
| | 0.1 | 0.49 | 0.61 | 0.51 | 0.96 | 0.96 | 1 | 0.86 |
| WV-4160 | 0.12 | 0.55 | 0.82 | 1.19 | 1.22 | 1.39 | 1.18 | 1.44 |
| | 0.19 | 0.52 | 0.71 | 1.04 | 1.11 | 1.15 | 1.02 | 1.08 |
| WV-4256 | 0.2 | 0.77 | 1.17 | 1.5 | 1.3 | 1.5 | 1.34 | 1.63 |
| | 0.19 | 0.67 | 0.84 | 1.02 | 1.15 | 1.6 | 0.99 | 0.87 |
| WV-4246 | 0.18 | 0.98 | 1.47 | 1.44 | 1.48 | 1.38 | 1.23 | 1.38 |
| | 0.18 | 0.55 | 0.71 | 0.51 | 1.06 | 1.21 | 1.1 | 1.18 |
| WV-4261 | 0.13 | 0.84 | 1.05 | 1.19 | 0.96 | 1.82 | 1.62 | 1.61 |
| | 0.15 | 0.55 | 0.79 | 0.51 | 1.1 | 1.2 | 1.08 | 0.96 |
| WV-4251 | 0.09 | 0.72 | 1.06 | 1.25 | 1.31 | 1.44 | 1.51 | 1.63 |
| | 0.1 | 0.37 | 0.75 | 0.51 | 1.08 | 1.41 | 0.98 | 1.32 |
| WV-4257 | 0.13 | 0.77 | 0.95 | 1.56 | 1.54 | 1.19 | 1.69 | 1.8 |
| | 0.21 | 0.64 | 0.86 | 0.51 | 1.02 | 1.32 | 0.9 | 0.83 |
| WV-4247 | 0.05 | 0.46 | 0.78 | 1.23 | 1.32 | 1.55 | 1.3 | 1.43 |
| | 0.06 | 0.39 | 0.66 | 1.13 | 0.97 | 1.28 | 1.04 | 0.94 |
| WV-4262 | 0.13 | 0.62 | 1.07 | 1.34 | 1.05 | 1.3 | 1.36 | 1.65 |
| | 0.19 | 0.58 | 0.9 | 0.51 | 0.87 | 1.11 | 0.89 | 1.04 |
| WV-4252 | 0.04 | 0.3 | 0.5 | 1.02 | 1.02 | 1.11 | 1.04 | 1.22 |
| | 0.06 | 0.26 | 0.59 | 0.84 | 0.87 | 1.05 | 0.76 | 0.8 |

| Conc. (nM) | 25 | 6.25 | 1.56 | 0.3906 | 0.0976 | 0.0244 | 0.00610 | 0.00152 |
|---|---|---|---|---|---|---|---|---|
| H2O | 0.73 | 0.68 | 0.72 | | 1.13 | | 0.75 | 0.91 |
| | | 0.52 | | 1.22 | 0.83 | 0.97 | 0.76 | 0.87 |
| WV-4248 | 0.27 | 0.65 | 0.98 | | 1.03 | 0.87 | 0.91 | 0.98 |
| | 0.18 | 0.78 | | 1.19 | | 0.91 | 1.09 | 1.15 |
| WV-4162 | 0.14 | 0.08 | 0.29 | | 1.03 | 0.76 | 0.93 | 0.88 |
| | 0.07 | 0.08 | 0.29 | 0.83 | 0.87 | 1.14 | 1.09 | 1.04 |
| WV-4139 | 0.08 | 0.08 | 0.19 | | 1.02 | 1 | 1.15 | 1.16 |
| | 0.07 | 0.08 | 0.25 | 0.63 | 0.94 | 1.1 | 1.21 | |
| WV-4173 | 0.08 | 0.08 | 0.21 | | 0.94 | 0.8 | 0.95 | 1.3 |
| | 0.08 | 0.08 | 0.19 | 0.56 | 0.97 | 0.92 | 1.09 | 1.28 |
| WV-4150 | 0.05 | 0.08 | 0.15 | | 0.93 | 1.13 | 1.29 | 1.06 |
| | 0.05 | 0.1 | 0.21 | 0.31 | 0.8 | 1.31 | | |
| WV-4167 | 0.07 | 0.23 | 0.74 | | 0.85 | 1.13 | 1.09 | 1.13 |
| | 0.12 | 0.32 | 0.77 | 0.69 | 1.31 | | 1.19 | 1.41 |
| WV-4144 | 0.06 | 0.14 | 0.27 | | 0.91 | 0.91 | 0.72 | 1.05 |
| | 0.08 | 0.19 | 0.53 | 0.97 | 1.36 | 1.06 | 1.2 | 1.08 |
| WV-3137 | 0.07 | 0.25 | 0.42 | 1.02 | 1.18 | 0.95 | 0.92 | 0.86 |
| | 0.07 | 0.25 | 0.66 | 1.11 | 1.04 | 1.1 | 0.95 | 1.06 |
| WV-4155 | 0.07 | 0.1 | 0.16 | 0.67 | 0.77 | 0.75 | 0.87 | 0.81 |
| | 0.16 | 0.1 | 0.4 | 0.95 | | 1.02 | 0.68 | 1.06 |
| WV-4166 | 0.16 | 0.23 | 0.16 | 0.84 | 0.66 | 0.77 | 0.77 | 0.88 |
| | 0.15 | 0.27 | 0.68 | 0.76 | 1.06 | 0.79 | 0.79 | 0.88 |
| WV-4143 | 0.05 | 0.17 | 0.16 | | 0.7 | 0.74 | 0.86 | 0.97 |
| | 0.05 | 0.2 | 0.47 | 1.09 | 1.05 | 0.69 | 0.55 | 0.85 |

| Log Conc. (nM) | 25 | 6.25 | 1.5625 | 0.3906 | 0.0976 | 0.0244 | 0.0061 | 0.00152 |
|---|---|---|---|---|---|---|---|---|
| H2O | 0.78 | 0.75 | 0.78 | 0.95 | 0.7 | 0.84 | 1.01 | 1.06 |
| | 0.68 | 0.79 | 0.84 | 0.98 | 0.56 | | 0.57 | 0.68 |
| WV-4186 | 0.06 | 0.09 | 0.12 | 0.15 | 0.61 | 0.77 | 0.82 | 0.98 |
| | 0.05 | 0.12 | 0.14 | 0.23 | 0.38 | 0.69 | 1.17 | 0.83 |
| WV-4258 | 0.29 | 0.56 | 0.71 | 0.75 | 0.81 | 0.98 | 1.01 | 1.25 |
| | 0.34 | 0.45 | 0.87 | | 0.88 | 0.82 | | 0.92 |
| WV-4248 | 0.79 | 0.69 | 0.82 | 0.77 | 0.83 | 0.86 | 0.87 | 1.01 |
| | 0.93 | 0.87 | 0.77 | | 0.8 | 1.07 | 0.97 | 1.02 |
| WV-4263 | 0.72 | 0.64 | 0.85 | 0.93 | 0.95 | 1.01 | 1.03 | 0.91 |
| | 0.81 | 0.73 | | 0.9 | | 0.86 | 0.27 | 1 |
| WV-4253 | 0.75 | 0.84 | 0.88 | 0.85 | 0.83 | 0.71 | 0.65 | 0.98 |
| | 0.92 | 0.82 | 0.73 | 0.85 | 1.02 | 0.98 | 1.03 | 1.04 |
| WV-4161 | 0.22 | 0.22 | 0.39 | 0.65 | 1.03 | 0.99 | 0.71 | 1.08 |
| | 0.17 | 0.22 | 0.35 | 0.56 | 0.93 | 0.96 | 0.94 | 1 |
| WV-2817 | 0.2 | 0.23 | 0.34 | 1.26 | 0.79 | 0.82 | 1.05 | 1.12 |
| | 0.19 | 0.24 | 0.33 | 0.64 | 0.68 | | 0.94 | 1 |
| WV-3122 | 0.19 | 0.16 | 0.31 | | 0.79 | 0.78 | 1.08 | 0.96 |
| | 0.11 | 0.18 | 0.36 | 0.44 | 0.54 | 0.81 | 0.82 | 0.88 |
| WV-3021 | 0.28 | | 0.28 | 0.45 | 0.61 | 0.94 | 1.07 | 1.06 |
| | | 0.17 | 0.31 | 0.47 | 0.64 | 0.86 | 0.9 | 1.08 |
| WV-4171 | 0.32 | 0.62 | 0.86 | | 1 | 0.61 | 1.01 | 1.08 |
| | 0.23 | 0.69 | 1.08 | | 1.12 | 1.05 | 0.91 | 0.93 |
| WV-4148 | 0.32 | 0.52 | 0.92 | 0.83 | 1.26 | 0.73 | | 1.01 |
| | 0.22 | 0.59 | 1.16 | 1.1 | 0.86 | 1.12 | | 1.13 |
| H2O | 0.78 | 0.86 | 0.71 | 0.67 | 0.9 | 0.65 | 0.73 | 0.92 |
| | 0.62 | 0.73 | 0.93 | 0.94 | | 0.87 | 0.72 | 0.78 |
| WV-4186 | | 0.07 | 0.18 | 0.2 | 0.32 | 0.68 | 0.69 | 0.7 |
| | 0.21 | 0.11 | 0.12 | 0.24 | 0.36 | 0.61 | 0.87 | 0.89 |
| WV-4181 | 0.24 | 0.85 | 0.75 | 0.74 | 0.96 | 0.81 | 0.82 | 1.05 |
| | 0.18 | 0.46 | 0.9 | 0.9 | | 0.76 | 1.09 | 0.85 |
| WV-4159 | 0.26 | 0.45 | | 0.75 | 0.8 | 0.98 | 0.91 | 0.92 |
| | 0.17 | 0.27 | | 0.76 | 0.75 | 0.87 | 0.92 | 0.98 |
| WV-4170 | 0.38 | 0.96 | 0.73 | 0.88 | 0.35 | 1.08 | 1.15 | 1.1 |
| | 0.3 | 0.6 | 0.88 | 0.94 | 0.85 | 1.09 | 0.84 | 1 |
| WV-4147 | 0.22 | 0.46 | 0.61 | 0.19 | 0.81 | 1.12 | 0.95 | 1.12 |
| | 0.2 | 0.34 | | | 0.8 | 0.58 | 0.76 | 1.03 |
| WV-4180 | 0.43 | 0.77 | 0.29 | 0.44 | 1 | 1.01 | 1.21 | 1.36 |
| | 0.41 | 0.46 | 0.65 | 0.32 | 0.91 | 0.44 | 1.01 | 0.93 |
| WV-4158 | 0.3 | 0.44 | | 0.91 | 0.54 | 0.93 | 0.82 | 1.22 |
| | 0.17 | 0.42 | 0.72 | 0.98 | | 1.07 | 1.11 | 1.01 |
| WV-4169 | 0.46 | 0.86 | 0.92 | 0.69 | 0.98 | 0.91 | 1.11 | 1.17 |
| | 0.34 | 0.63 | 0.96 | 1.12 | 0.78 | 1.09 | | 0.95 |
| WV-4146 | 0.27 | 0.56 | 0.72 | 0.83 | 0.84 | 0.86 | | 1.01 |
| | 0.16 | 0.45 | | 1.15 | 0.76 | 0.98 | 0.87 | 0.98 |
| WV-4179 | 0.56 | 0.75 | 1.12 | 1.15 | | | 0.75 | 1.04 |
| | 0.19 | 0.64 | 0.8 | 0.84 | 0.87 | 1.12 | 1.01 | 0.8 |
| WV-4157 | 0.2 | 0.33 | 0.72 | 0.85 | 1.25 | 0.87 | 1.03 | 0.99 |
| | 0.1 | 0.31 | 0.55 | 1.04 | 0.74 | 1.48 | 0.77 | 1.15 |

| Log Conc. (nM) | 25 | 6.25 | 1.5625 | 0.390625 | 0.097656 | 0.024414 | 0.006104 | 0.001526 |
|---|---|---|---|---|---|---|---|---|
| H2O | 0.78 | 0.75 | 0.78 | 0.95 | 0.7 | 0.84 | 1.01 | 1.06 |
| | 0.68 | 0.79 | 0.84 | 0.98 | 0.56 | | 0.57 | 0.68 |
| WV-4186 | 0.06 | 0.09 | 0.12 | 0.15 | 0.61 | 0.77 | 0.82 | 0.98 |
| | 0.05 | 0.12 | 0.14 | 0.23 | 0.38 | 0.69 | 1.17 | 0.83 |
| WV-4258 | 0.29 | 0.56 | 0.71 | 0.75 | 0.81 | 0.98 | 1.01 | 1.25 |
| | 0.34 | 0.45 | 0.87 | | 0.88 | 0.82 | | 0.92 |
| WV-4248 | 0.79 | 0.69 | 0.82 | 0.77 | 0.83 | 0.86 | 0.87 | 1.01 |
| | 0.93 | 0.87 | 0.77 | | 0.8 | 1.07 | 0.97 | 1.02 |
| WV-4263 | 0.72 | 0.64 | 0.85 | 0.93 | 0.95 | 1.01 | 1.03 | 0.91 |
| | 0.81 | 0.73 | | 0.9 | | 0.86 | 0.27 | 1 |
| WV-4253 | 0.75 | 0.84 | 0.88 | 0.85 | 0.83 | 0.71 | 0.65 | 0.98 |
| | 0.92 | 0.82 | 0.73 | 0.85 | 1.02 | 0.98 | 1.03 | 1.04 |
| WV-4161 | 0.22 | 0.22 | 0.39 | 0.65 | 1.03 | 0.99 | 0.71 | 1.08 |
| | 0.17 | 0.22 | 0.35 | 0.56 | 0.93 | 0.96 | 0.94 | 1 |
| WV-2817 | 0.2 | 0.23 | 0.34 | 1.26 | 0.79 | 0.82 | 1.05 | 1.12 |
| | 0.19 | 0.24 | 0.33 | 0.64 | 0.68 | | 0.94 | 1 |
| WV-3122 | 0.19 | 0.16 | 0.31 | | 0.79 | 0.78 | 1.08 | 0.96 |
| | 0.11 | 0.18 | 0.36 | 0.44 | 0.54 | 0.81 | 0.82 | 0.88 |
| WV-3021 | 0.28 | | 0.28 | 0.45 | 0.61 | 0.94 | 1.07 | 1.06 |
| | | 0.17 | 0.31 | 0.47 | 0.64 | 0.86 | 0.9 | 1.08 |
| WV-4171 | 0.32 | 0.62 | 0.86 | | 1 | 0.61 | 1.01 | 1.08 |
| | 0.23 | 0.69 | 1.08 | | 1.12 | 1.05 | 0.91 | 0.93 |
| WV-4148 | 0.32 | 0.52 | 0.92 | 0.83 | 1.26 | 0.73 | | 1.01 |
| | 0.22 | 0.59 | 1.16 | 1.1 | 0.86 | 1.12 | | 1.13 |

[1777] As shown in Tables 48 to 60, various oligonucleotides were constructed and tested for their ability to mediate knockdown of APOC3, including in vitro. Without wishing to be bound by any theory, the present disclosure suggests that at least some of the oligonucleotides in Tables 48 to 60 may be capable of mediating knockdown via a RNaseH-mediated mechanism. FIG. 2 shows example formats of oligonucleotides. In some embodiments, oligonucleotides of these example formats can be RNase-H dependent antisense oligonucleotides (ASOs). In addition, some of the oligonucleotides in these tables have a hybrid format.

TABLE 48
In vitro efficacy of different ASOs which target APOC3.

| | 3 nM | 30 nM | Oligonucleotide | 3 nM | 30 nM |
|---|---|---|---|---|---|
| WV-753 332 | 0.690 | 0.075 | WV-747 151 | 0.773 | 0.464 |
| WV-744 499 | 0.634 | 0.111 | WV-705 210 | 0.803 | 0.467 |
| WV-754 333 | 0.581 | 0.112 | WV-759 142 | 0.775 | 0.469 |
| WV-742 225 | 0.576 | 0.125 | WV-772 149 | 0.905 | 0.473 |
| WV-755 334 | 0.568 | 0.150 | WV-703 159 | 0.823 | 0.480 |
| WV-743 226 | 0.607 | 0.161 | WV-706 81 | 0.831 | 0.480 |
| WV-737 193 | 0.744 | 0.161 | WV-704 160 | 0.774 | 0.483 |
| WV-769 168 | 0.695 | 0.176 | WV-709 109 | 0.769 | 0.488 |
| WV-722 267 | 0.842 | 0.179 | WV-774 115 | 0.734 | 0.490 |
| WV-738 221 | 0.634 | 0.182 | WV-702 158 | 0.771 | 0.491 |
| WV-715 330 | 0.601 | 0.182 | WV-765 319 | 0.889 | 0.493 |
| WV-721 230 | 0.766 | 0.190 | WV-713 153 | 0.825 | 0.512 |
| WV-741 224 | 0.685 | 0.200 | WV-762 310 | 0.859 | 0.528 |
| WV-723 501 | 0.542 | 0.204 | WV-711 111 | 0.897 | 0.533 |
| WV-750 186 | 0.758 | 0.210 | WV-710 110 | 0.801 | 0.536 |
| WV-749 183 | 0.691 | 0.217 | WV-776 2126 Intron | 0.834 | 0.539 |
| WV-720 229 | 0.687 | 0.232 | WV-764 318 | 0.899 | 0.542 |
| WV-752 188 | 0.759 | 0.233 | WV-763 312 | 0.905 | 0.558 |
| WV-739 222 | 0.725 | 0.236 | WV-708 108 | 0.889 | 0.559 |
| WV-714 155 | 0.789 | 0.240 | WV-696 162 | 1.043 | 0.561 |
| WV-767 321 | 0.767 | 0.246 | WV-712 112 | 0.736 | 0.570 |
| WV-717 165 | 0.716 | 0.258 | WV-693 13 | 0.748 | 0.588 |
| WV-751 187 | 0.782 | 0.260 | WV-775 314 | 0.856 | 0.600 |
| WV-736 190 | 0.743 | 0.261 | WV-778 557 Intron | 0.757 | 0.603 |
| WV-698 164 | 0.526 | 0.264 | WV-716 484 | 0.874 | 0.626 |
| WV-740 223 | 0.697 | 0.292 | WV-733 100 | 0.821 | 0.634 |
| WV-718 166 | 0.705 | 0.302 | WV-692 12 | 0.946 | 0.634 |
| WV-735 172 | 0.731 | 0.308 | WV-746 106 | 0.841 | 0.657 |
| WV-757 396 | 0.698 | 0.341 | WV-773 143 | 0.862 | 0.676 |
| WV-701 157 | 0.734 | 0.346 | WV-770 5 | 0.857 | 0.715 |
| WV-766 320 | 0.832 | 0.348 | WV-724 4 | 0.943 | 0.729 |
| WV-697 163 | 0.780 | 0.353 | WV-777 2593 Intron | 0.801 | 0.762 |
| WV-760 306 | 0.773 | 0.367 | WV-730 97 | 0.967 | 0.764 |
| WV-699 206 | 0.814 | 0.369 | WV-771 105 | 0.922 | 0.784 |
| WV-768 152 | 0.857 | 0.369 | WV-745 103 | 1.064 | 0.789 |
| WV-758 73 | 0.867 | 0.384 | WV-694 19 | 0.782 | 0.792 |
| WV-695 161 | 0.720 | 0.400 | WV-707 107 | 0.951 | 0.805 |
| WV-756 394 | 0.780 | 0.406 | WV-734 101 | 0.898 | 0.818 |
| WV-748 177 | 0.734 | 0.411 | WV-732 99 | 0.819 | 0.871 |
| WV-700 156 | 0.884 | 0.423 | WV-731 98 | 0.856 | 0.952 |
| WV-726 36 | 0.728 | 0.425 | WV-729 95 | 1.045 | 1.210 |
| WV-725 33 | 0.736 | 0.436 | WV-728 94 | 0.898 | 1.281 |
| WV-761 307 | 0.962 | 0.458 | WV-727 93 | 0.842 | 1.541 |
| WV-719 201 | 0.673 | 0.460 | | | |

The oligonucleotide ID (identity) and position APOC3 is given. For example, WV-753 332 indicates oligonucleotide WV-753 at position 332 in the APOC3 gene. Oligonucleotides tested are: WV-692 to WV-777. In this table and various other tables, numbers indicate level of mRNA of APOC3/GAPDH, relative to untreated control, wherein 1 would represent no knockdown of APOC3 mRNA and 0 would represent 100% knockdown. Some oligonucleotides are not to target an intron of APOC3.

TABLE 49
In vitro efficacy of different ASOs, which target APOC3.

| Oligonucleotide | 3 nM | 30 nM |
|---|---|---|
| WV-840 499 | 0.387 | 0.099 |
| WV-849 332 | 0.448 | 0.109 |
| WV-853 396 | 0.668 | 0.123 |
| WV-838 225 | 0.356 | 0.146 |
| WV-852 394 | 0.650 | 0.166 |
| WV-839 226 | 0.455 | 0.167 |
| WV-837 224 | 0.466 | 0.172 |
| WV-833 193 | 0.681 | 0.174 |
| WV-831 172 | 0.570 | 0.181 |
| WV-819 501 | 0.319 | 0.189 |
| WV-847 187 | 0.553 | 0.204 |
| WV-848 188 | 0.620 | 0.210 |
| WV-845 183 | 0.586 | 0.225 |
| WV-863 321 | 0.632 | 0.227 |
| WV-791 161 | 0.843 | 0.229 |
| WV-811 330 | 0.576 | 0.244 |
| WV-836 223 | 0.379 | 0.245 |
| WV-801 210 | 0.826 | 0.246 |
| WV-832 190 | 0.695 | 0.250 |
| WV-818 267 | 0.730 | 0.251 |
| WV-813 165 | 0.707 | 0.251 |
| WV-834 211 | 0.525 | 0.256 |
| WV-816 229 | 0.549 | 0.256 |
| WV-850 333 | 0.508 | 0.257 |
| WV-864 152 | 0.714 | 0.265 |
| WV-817 230 | 0.613 | 0.267 |
| WV-856 306 | 0.566 | 0.279 |
| WV-862 320 | 0.647 | 0.280 |
| WV-861 319 | 0.751 | 0.288 |
| WV-854 73 | 0.605 | 0.289 |
| WV-844 177 | 0.777 | 0.299 |
| WV-865 168 | 0.552 | 0.304 |
| WV-799 159 | 0.802 | 0.307 |
| WV-857 307 | 0.681 | 0.315 |
| WV-792 162 | 0.917 | 0.320 |
| WV-815 201 | 0.679 | 0.330 |
| WV-846 186 | 0.576 | 0.330 |
| WV-800 160 | 0.940 | 0.331 |
| WV-812 484 | 0.684 | 0.335 |
| WV-835 222 | 0.455 | 0.336 |
| WV-793 163 | 0.906 | 0.349 |
| WV-814 166 | 0.714 | 0.350 |
| WV-860 318 | 0.690 | 0.370 |
| WV-797 157 | 0.841 | 0.372 |
| WV-794 164 | 0.613 | 0.379 |
| WV-851 334 | 0.477 | 0.387 |
| WV-871 314 | 0.628 | 0.394 |
| WV-807 111 | 0.795 | 0.400 |
| WV-809 153 | 0.768 | 0.405 |
| WV-822 36 | 0.593 | 0.418 |
| WV-806 110 | 0.741 | 0.428 |
| WV-868 149 | 0.871 | 0.442 |
| WV-805 109 | 0.761 | 0.442 |
| WV-870 115 | 0.741 | 0.442 |
| WV-855 142 | 0.687 | 0.453 |
| WV-810 155 | 0.729 | 0.454 |
| WV-796 156 | 0.677 | 0.454 |
| WV-802 81 | 0.901 | 0.469 |
| WV-798 158 | 0.799 | 0.475 |
| WV-808 112 | 0.754 | 0.475 |
| WV-858 310 | 0.712 | 0.480 |
| WV-789 13 | 0.826 | 0.494 |
| WV-821 33 | 0.652 | 0.501 |
| WV-788 12 | 0.763 | 0.520 |
| WV-804 108 | 0.692 | 0.534 |
| WV-820 4 | 0.774 | 0.553 |
| WV-872 2126 Intron | 0.674 | 0.558 |
| WV-874 557 Intron | 0.634 | 0.560 |
| WV-829 100 | 0.909 | 0.586 |
| WV-795 206 | 0.876 | 0.600 |
| WV-842 1076 | 0.752 | 0.617 |
| WV-866 5 | 0.767 | 0.622 |
| WV-830 101 | 0.809 | 0.636 |
| WV-843 151 | 0.705 | 0.657 |
| WV-873 2593 Intron | 0.883 | 0.672 |
| WV-869 143 | 0.647 | 0.680 |
| WV-841 103 | 0.974 | 0.708 |
| WV-803 107 | 0.815 | 0.716 |
| WV-790 19 | 0.942 | 0.784 |
| WV-859 312 | 0.729 | 0.785 |
| WV-867 105 | 0.756 | 0.838 |
| WV-826 97 | 0.757 | 0.876 |
| WV-828 99 | 0.630 | 0.885 |
| WV-827 98 | 0.719 | 1.015 |
| WV-825 95 | 1.070 | 1.121 |
| WV-823 93 | 1.013 | 1.289 |
| WV-824 94 | 0.846 | 1.331 |

The oligonucleotide ID (identity) and position APOC3 is given. For example, WV-840 499 indicates oligonucleotide WV-840 at position 499 in the APOC3 gene. Oligonucleotides tested are: WV-788 to WV-873.

TABLE 50
In vitro efficacy of different ASOs which target APOC3.

| | 30 nM | 3 nM |
|---|---|---|
| WV-1434″172 | 0.125 | 0.683 |
| WV-1443″499 | 0.169 | 0.419 |
| WV-1437″221 | 0.171 | 0.620 |
| WV-1453″333 | 0.174 | 0.539 |
| WV-1414″330 | 0.178 | 0.515 |
| WV-1456″396 | 0.178 | 0.655 |
| WV-1435″190 | 0.182 | 0.646 |
| WV-1419″229 | 0.195 | 0.664 |
| WV-1448″183 | 0.195 | 0.619 |
| WV-840 5-15 499 | 0.198 | 0.482 |
| WV-1442″226 | 0.208 | 0.615 |
| WV-1455″394 | 0.213 | 0.671 |
| WV-1440″224 | 0.219 | 0.523 |
| WV-1451″188 | 0.224 | 0.626 |
| WV-1439″223 | 0.228 | 0.539 |
| WV-1459″306 | 0.229 | 0.697 |
| WV-1454″334 | 0.231 | 0.641 |
| WV-1421″267 | 0.233 | 0.627 |
| WV-1395″162 | 0.237 | 0.797 |
| WV-1466″321 | 0.238 | 0.598 |
| WV-1450″187 | 0.241 | 0.769 |
| WV-1422″501 | 0.243 | 0.525 |
| WV-1402″159 | 0.258 | 0.658 |
| WV-1405″81 | 0.261 | 0.714 |
| WV-1416″165 | 0.268 | 0.549 |
| WV-1418″201 | 0.275 | 0.658 |
| WV-1438″222 | 0.277 | 0.501 |
| WV-744 AIIDNA 499 | 0.288 | 0.896 |
| WV-1458″142 | 0.290 | 0.588 |
| WV-1394″161 | 0.292 | 0.581 |
| WV-1424″33 | 0.296 | 0.519 |
| WV-1474″314 | 0.300 | 0.584 |
| WV-1461″310 | 0.310 | 0.718 |
| WV-1397″164 | 0.313 | 0.767 |
| WV-1411″112 | 0.314 | 0.584 |
| WV-1403″160 | 0.321 | 0.591 |
| WV-1467″152 | 0.325 | 0.926 |
| WV-1464″319 | 0.326 | 0.524 |
| WV-1410″111 | 0.329 | 0.426 |
| WV-1413″155 | 0.337 | 0.714 |
| WV-1408″109 | 0.364 | 0.753 |
| WV-1447″177 | 0.365 | 0.759 |
| WV-1400″157 | 0.371 | 0.604 |
| WV-1477″557 Int | 0.386 | 0.790 |
| WV-1398″206 | 0.397 | 0.619 |
| WV-1399″156 | 0.410 | 0.753 |
| WV-1472″143 | 0.418 | 0.776 |
| WV-1475″2126 Int | 0.419 | 0.881 |
| WV-1407″108 | 0.441 | 0.669 |
| WV-1415″484 | 0.442 | 0.703 |
| WV-1462″312 | 0.446 | 0.833 |
| WV-1463″318 | 0.458 | 1.022 |
| WV-1471″149 | 0.468 | 0.963 |
| WV-1445″106 | 0.473 | 0.884 |
| WV-1469″5 | 0.490 | 0.817 |
| WV-1479″792 Int | 0.514 | 0.981 |
| WV-1391 ″12 | 0.530 | 0.833 |
| WV-1392 ″13 | 0.534 | 0.758 |
| WV-1480″793 Int | 0.546 | 0.982 |
| WV-1406″107 | 0.559 | 0.966 |
| WV-1432″100 | 0.560 | 0.745 |
| WV-1423″4 | 0.571 | 0.805 |
| WV-1449″186 | 0.578 | 0.717 |
| WV-1427″94 | 0.619 | 0.872 |
| WV-1452″332 | 0.628 | 0.876 |
| WV-1425″36 | 0.629 | 0.865 |
| WV-1465″320 | 0.630 | 0.762 |
| WV-1404″210 | 0.643 | 0.770 |
| WV-1393″19 | 0.645 | 0.879 |
| WV-1441″225 | 0.648 | 0.720 |
| WV-1401″158 | 0.652 | 0.770 |
| WV-1431″99 | 0.662 | 0.796 |
| WV-1417″166 | 0.664 | 0.720 |
| WV-1409″110 | 0.668 | 0.838 |
| WV-1446″151 | 0.669 | 0.928 |
| WV-1444″103 | 0.669 | 0.823 |
| WV-1429″97 | 0.675 | 0.894 |
| WV-1428″95 | 0.690 | 0.874 |
| WV-1412″153 | 0.693 | 0.803 |
| WV-1473″115 | 0.696 | 0.668 |
| WV-1476″2593 Int | 0.697 | 1.073 |
| WV-1420″230 | 0.711 | 0.525 |
| WV-1396″163 | 0.718 | 0.880 |
| WV-1436″193 | 0.719 | 0.970 |
| WV-1433″101 | 0.724 | 0.395 |
| WV-1457″73 | 0.729 | 1.001 |
| WV-1426″93 | 0.760 | 0.832 |
| WV-1468″168 | 0.769 | 0.971 |
| WV-1430″98 | 0.782 | 0.829 |
| WV-1470″105 | 0.800 | 0.618 |
| WV-1460″307 | 0.804 | 0.880 |
| WV-1481″796 Int | 0.810 | 1.319 |
| TR Only″ | 0.974 | 0.961 |
| WV-1478″780 Int | 0.992 | 1.403 |
| TR Only″ | 1.026 | 1.039 |

The oligonucleotide ID (identity) and position in APOC3 are provided. For example, WV-1434 172 indicates oligonucleotide WV-1434 at position 172 in the APOC3 gene (wherein the oligonucleotide designation and position are separated by ″).

TABLE 51
In vitro efficacy of different ASOs, which target APOC3.

| | 3 nM | 30 nM | 3 nM | 30 nM |
|---|---|---|---|---|
| WV-779 780 | 0.981 | 0.695 | 0.113 | 0.013 |
| WV-780 792 | 0.921 | 0.623 | 0.096 | 0.003 |
| WV-781 793 | 0.877 | 0.568 | 0.061 | 0.049 |
| WV-782 796 | 0.818 | 0.546 | 0.071 | 0.060 |
| WV-783 1130 | 0.886 | 0.709 | 0.086 | 0.057 |
| WV-784 2649 | 0.872 | 0.419 | 0.139 | 0.022 |
| WV-785 2734 | 0.876 | 0.756 | 0.115 | 0.056 |
| WV-786 2771 | 0.871 | 0.770 | 0.017 | 0.017 |
| WV-787 2803 | 0.896 | 0.681 | 0.003 | 0.042 |
| WV-875 | 0.922 | 0.559 | 0.139 | 0.014 |
| WV-876 | 0.782 | 0.493 | 0.052 | 0.007 |
| WV-877 | 0.865 | 0.510 | 0.014 | 0.024 |
| WV-878 | 0.717 | 0.462 | 0.232 | 0.025 |
| WV-879 | 0.887 | 0.795 | 0.027 | 0.020 |
| WV-880 | 0.719 | 0.361 | 0.152 | 0.020 |
| WV-881 | 0.888 | 0.790 | 0.053 | 0.084 |
| WV-882 | 0.909 | 0.665 | 0.197 | 0.060 |
| WV-883 | 0.900 | 0.630 | 0.100 | 0.079 |

The oligonucleotide ID (identity) and position in APOC3 are provided. FOXO1 ASOs were also tested (data not shown).

TABLE 52
In vitro efficacy of different ASOs, which target APOC3.

| | | | |
|---|---|---|---|
| Conc (exp | | | |
| 10) (nM) | WV-744 499 | WV-753 332 | WV-742 225 |

| | | | | | | |
|---|---|---|---|---|---|---|
| 1.778 | 0.11 | −0.01 | −0.07 | −0.06 | −0.08 | −0.01 |
| 1.301 | 0.18 | 0.17 | 0.07 | 0.02 | 0.06 | 0.01 |
| 0.824 | 0.47 | 0.32 | 0.32 | 0.27 | 0.24 | 0.15 |
| 0.347 | 0.76 | 0.59 | 0.64 | 0.59 | 0.66 | 0.57 |
| −0.130 | 1.01 | 0.90 | 0.88 | 0.73 | 0.91 | 0.65 |
| −0.607 | 1.26 | 0.99 | 0.95 | 0.81 | 0.97 | 0.80 |
| −1.085 | 1.02 | 1.02 | 1.03 | 0.85 | 0.90 | 0.94 |
| −1.562 | | | | | | |

| | | | |
|---|---|---|---|
| Conc (exp | | | |
| 10) (nM) | WV-737 193 | WV-840 499 | WV-849 332 |

| | | | | | | |
|---|---|---|---|---|---|---|
| 1.778 | −0.01 | −0.06 | −0.04 | −0.03 | −0.05 | −0.08 |
| 1.301 | 0.09 | 0.09 | 0.01 | 0.01 | 0.05 | 0.05 |
| 0.824 | 0.57 | 0.38 | 0.18 | 0.11 | 0.16 | 0.16 |
| 0.347 | 0.82 | 0.76 | 0.37 | 0.32 | 0.44 | 0.41 |
| −0.130 | 0.91 | 0.85 | 0.65 | 0.57 | 0.73 | 0.68 |
| −0.607 | 1.07 | 1.06 | 1.04 | 0.76 | 1.09 | 0.89 |
| −1.085 | 1.02 | 1.07 | 0.92 | 0.97 | 1.00 | 0.83 |
| −1.562 | | | | | | |

| | | | |
|---|---|---|---|
| Conc (exp | | | |
| 10) (nM) | WV-838 225 | WV-833 193 | WV-1443 499 |

| | | | | | | |
|---|---|---|---|---|---|---|
| 1.778 | −0.07 | −0.07 | 0.01 | 0.00 | 0.10 | 0.19 |
| 1.301 | 0.04 | −0.01 | 0.09 | 0.06 | 0.32 | 0.21 |
| 0.824 | 0.13 | 0.09 | 0.34 | 0.27 | 0.30 | 0.26 |
| 0.347 | 0.40 | 0.30 | 0.68 | 0.61 | 0.43 | 0.45 |
| −0.130 | 0.71 | 0.74 | 0.94 | 0.98 | 0.81 | 0.64 |
| −0.607 | 1.00 | 0.95 | 1.16 | 0.95 | 0.95 | 0.71 |
| −1.085 | 1.08 | 1.06 | 1.09 | 0.99 | 0.88 | 0.92 |
| −1.562 | | | | | 1.04 | 1.19 |

| | | | |
|---|---|---|---|
| Conc (exp | | | |
| 10) (nM) | WV-1452 332 | WV-1441 225 | WV-1436 193 |

| | | | | | | |
|---|---|---|---|---|---|---|
| 1.778 | 0.02 | 0.01 | 0.13 | 0.05 | 0.07 | 0.09 |
| 1.301 | 0.10 | 0.10 | 0.18 | 0.15 | 0.28 | 0.26 |
| 0.824 | 0.27 | 0.34 | 0.37 | 0.31 | 0.57 | 0.68 |
| 0.347 | 0.63 | 0.44 | 0.73 | 0.55 | 0.78 | 0.82 |
| −0.130 | 0.86 | 0.80 | 0.89 | 0.82 | 0.84 | 0.97 |
| −0.607 | 1.11 | 0.88 | 1.07 | 1.00 | 1.12 | 0.95 |
| −1.085 | 0.92 | 0.93 | 0.94 | 0.95 | 0.72 | 1.05 |
| −1.562 | 1.43 | 0.89 | 1.27 | 0.96 | 0.83 | 1.03 |

| | |
|---|---|
| Conc (exp | |
| 10) (nM) | WV-437 |

| | | |
|---|---|---|
| 1.778 | 1.37 | 1.43 |
| 1.301 | 1.21 | 1.18 |
| 0.824 | 0.99 | 1.03 |
| 0.347 | 1.25 | 1.25 |
| −0.130 | 1.14 | 1.06 |
| −0.607 | 1.49 | 1.20 |
| −1.085 | 1.46 | 1.44 |
| −1.562 | | |

| | WV-744 499 | WV-753 332 | WV-742 225 | WV-737 193 | WV-840 499 | WV-849 332 |
|---|---|---|---|---|---|---|
| 1.778 | 0.08 | 0.01 | 0.05 | 0.04 | 0.00 | 0.02 |
| 1.301 | 0.01 | 0.04 | 0.03 | 0.00 | 0.01 | 0.00 |
| 0.824 | 0.11 | 0.03 | 0.06 | 0.14 | 0.05 | 0.00 |
| 0.347 | 0.12 | 0.03 | 0.06 | 0.04 | 0.03 | 0.02 |
| −0.130 | 0.08 | 0.11 | 0.19 | 0.04 | 0.06 | 0.04 |
| −0.607 | 0.19 | 0.09 | 0.12 | 0.01 | 0.20 | 0.14 |
| −1.085 | 0.00 | 0.13 | 0.03 | 0.04 | 0.04 | 0.12 |

| | WV-838 225 | WV-833 193 | WV-1443 499 | WV-1452 332 | WV-1441 225 | WV-1436 193 | WV-437 |
|---|---|---|---|---|---|---|---|
| 1.778 | 0.00 | 0.01 | 0.07 | 0.01 | 0.05 | 0.02 | 0.04 |
| 1.301 | 0.04 | 0.02 | 0.08 | 0.01 | 0.02 | 0.02 | 0.02 |
| 0.824 | 0.03 | 0.05 | 0.03 | 0.05 | 0.04 | 0.08 | 0.02 |
| 0.347 | 0.07 | 0.05 | 0.01 | 0.13 | 0.13 | 0.03 | 0.00 |
| −0.130 | 0.02 | 0.03 | 0.12 | 0.05 | 0.05 | 0.10 | 0.05 |
| −0.607 | 0.04 | 0.15 | 0.17 | 0.16 | 0.05 | 0.12 | 0.20 |
| −1.085 | 0.02 | 0.07 | 0.03 | 0.01 | 0.01 | 0.24 | 0.01 |
| −1.562 | | | 0.10 | 0.39 | 0.22 | 0.14 | |

The oligonucleotide ID (identity) and position in APOC3 are provided.

TABLE 53
In vitro efficacy screening of different ASOs which target APOC3.

| | 30 nM | 10 nM | 3 nM | | | | |
|---|---|---|---|---|---|---|---|
| WV-1863 330 | 0.068 | 0.128 | 0.303 | WV-1874 223 | 0.190 | 0.215 | 0.362 |
| WV-1878 499 | 0.072 | 0.122 | 0.204 | WV-1875 224 | 0.197 | 0.257 | 0.326 |
| WV-1864 165 | 0.076 | 0.219 | 0.566 | WV-1852 164 | 0.202 | 0.272 | 0.659 |
| WV-1886 394 | 0.079 | 0.184 | 0.360 | WV-1856 159 | 0.209 | 0.489 | 0.732 |
| WV-1870 172 | 0.083 | 0.120 | 0.236 | WV-1851 162 | 0.233 | 0.537 | 0.846 |
| WV-1887 395 | 0.086 | 0.287 | 0.587 | WV-1858 81 | 0.247 | 0.296 | 0.667 |
| WV-1868 501 | 0.094 | 0.091 | 0.141 | WV-1888 142 | 0.248 | 0.522 | 0.716 |
| WV-1883 332 | 0.104 | 0.182 | 0.271 | WV-1865 201 | 0.248 | 0.342 | 0.724 |
| WV-1885 334 | 0.109 | 0.255 | 0.325 | WV-1890 310 | 0.252 | 0.645 | 0.626 |
| WV-1884 333 | 0.118 | 0.223 | 0.352 | WV-1869 33 | 0.258 | 0.380 | 0.578 |
| WV-1876 225 | 0.126 | 0.257 | 0.343 | WV-1850 161 | 0.258 | 0.444 | 0.781 |
| WV-1880 183 | 0.135 | 0.354 | 0.541 | WV-1893 152 | 0.267 | 0.695 | 0.630 |
| WV-1867 267 | 0.135 | 0.315 | 0.464 | WV-1891 319 | 0.284 | 0.553 | 0.632 |
| WV-1871 190 | 0.138 | 0.164 | 0.410 | WV-1857 160 | 0.285 | 0.525 | 1.059 |
| WV-1873 222 | 0.147 | 0.251 | 0.383 | WV-1862 155 | 0.294 | 0.635 | 0.645 |
| WV-1872 221 | 0.149 | 0.237 | 0.367 | WV-1855 157 | 0.308 | 0.611 | 0.743 |
| WV-1889 306 | 0.160 | 0.284 | 0.550 | WV-1853 206 | 0.328 | 0.405 | 0.875 |
| WV-1879 177 | 0.168 | 0.370 | 0.596 | WV-1860 111 | 0.337 | 0.727 | 0.652 |
| WV-1892 321 | 0.169 | 0.485 | 0.618 | WV-1854 156 | 0.337 | 0.628 | 0.685 |
| WV-1881 187 | 0.174 | 0.218 | 0.390 | WV-1861 112 | 0.373 | 0.568 | 0.603 |
| WV-1882 188 | 0.182 | 0.350 | 0.586 | WV-1859 109 | 0.456 | 0.627 | 0.644 |
| WV-1865 229 | 0.186 | 0.261 | 0.415 | Control | 1.013 | 1.191 | 0.806 |
| | | | | WV-744 | 0.070 | 0.207 | 0.381 |
| | | | | WV-840 | 0.051 | 0.115 | 0.169 |
| | | | | WV-1443 | 0.205 | 0.246 | 0.194 |

The oligonucleotide ID (identity) and position in APOC3 are provided.

[1778] Table 54 shows in vitro efficacy of different ASOs, which target APOC3. Oligonucleotides tested are: WV-1868, WV-1878, WV-1887, WV-1886, WV-1885, WV-1884, WV-1883, WV-1863, WV-1876, WV-1871, WV-1870 and WV-1864.

TABLE 54
Activity of oligonucleotides.

| Conc (exp | | | | | | | | |
|---|---|---|---|---|---|---|---|---|
| 10) (nM) | WV-1868 | | WV-1878 | | WV-1887 | | WV-1886 | |
| 1.477 | 0.114 | 0.072 | 0.138 | 0.100 | 0.098 | 0.123 | 0.182 | 0.123 |
| 1.000 | 0.150 | 0.102 | 0.119 | 0.142 | 0.321 | 0.405 | 0.175 | 0.357 |
| 0.523 | 0.208 | 0.222 | 0.191 | 0.264 | 0.556 | 1.242 | 0.448 | 0.860 |
| 0.046 | 0.307 | 0.372 | 0.521 | 0.539 | 0.735 | 0.986 | 0.785 | 1.236 |
| −0.431 | 0.386 | 0.441 | 0.536 | 0.784 | 0.770 | 1.003 | 0.714 | 0.734 |
| −0.908 | 0.578 | 0.817 | 0.747 | 0.793 | 0.808 | 1.253 | 0.996 | 0.898 |
| −1.386 | 0.715 | 0.808 | 0.742 | 1.476 | 0.888 | 0.851 | 0.869 | 1.028 |
| Conc (exp | | | | | | | | |
| 10) (nM) | WV-1885 | | WV-1884 | | WV-1883 | | WV-1863 | |
| 1.477 | 0.156 | 0.148 | 0.200 | 0.150 | 0.138 | 0.085 | 0.097 | 0.074 |
| 1.000 | 0.254 | 0.358 | 0.294 | 0.293 | 0.261 | 0.198 | 0.180 | 0.207 |
| 0.523 | 0.353 | 0.553 | 0.391 | 0.554 | 0.413 | 0.399 | 0.277 | 0.430 |
| 0.046 | 0.590 | 0.776 | 0.548 | 0.748 | 0.531 | 0.611 | 0.553 | 0.731 |
| −0.431 | 0.703 | 0.939 | 0.582 | 0.795 | 0.794 | 0.635 | 0.575 | 0.731 |
| −0.908 | 0.797 | 0.846 | 0.769 | 0.702 | 0.910 | 0.694 | 0.846 | 0.921 |
| −1.386 | 0.747 | 1.063 | 0.787 | 0.828 | 0.831 | 0.797 | 0.725 | 1.137 |
| Conc (exp | | | | | | | | |
| 10) (nM) | WV-1876 | | WV-1871 | | WV-1870 | | WV-1864 | |
| 1.477 | 0.168 | 0.115 | 0.103 | 0.109 | 0.131 | 0.112 | 0.104 | 0.121 |
| 1.000 | 0.275 | 0.375 | 0.217 | 0.277 | 0.132 | 0.223 | 0.267 | 0.379 |
| 0.523 | 0.304 | 0.564 | 0.315 | 0.844 | 0.333 | 0.536 | 0.671 | 0.669 |
| 0.046 | 0.461 | 0.883 | 0.590 | 1.093 | 0.630 | 0.924 | 0.819 | 0.817 |
| −0.431 | 0.613 | 0.763 | 0.662 | 0.825 | 0.710 | 0.916 | 0.916 | 1.008 |
| −0.908 | 0.551 | 0.783 | 0.844 | 0.914 | 0.866 | 0.964 | 1.005 | 0.758 |
| −1.386 | 0.903 | 1.188 | 0.816 | 1.542 | 0.759 | 0.924 | 0.906 | 0.946 |

[1779] Table 55. Table 55 shows the IC50 of different ASOs, which target APOC3. Oligonucleotides tested are: WV-723, WV-819, WV-1422, and WV-1868.

TABLE 55
Activity of oligonucleotides.

| Oligonucleotide | IC50 (nM) |
|---|---|
| WV-723 | 1.5 |
| WV-819 | 0.5 |
| WV-1422 | 0.9 |
| WV-1868 | 1.4 |

[1780] Table 56. Table 56 shows in vitro efficacy of different ASOs, which target APOC3. Oligonucleotides tested are: WV-2115 to WV-2124, WV-2126, and WV-1422. The oligonucleotides have different but overlapping base sequences.

TABLE 56
Activity of oligonucleotides.

| | | | |
|---|---|---|---|
| Conc (exp | | | |
| 10) (nM) | WV-2115 | WV-2116 | WV-2117 |

| | | | | | | |
|---|---|---|---|---|---|---|
| 1.477 | 0.169 | 0.160 | 0.165 | 0.191 | 0.150 | 0.271 |
| 1.000 | 0.164 | 0.320 | 0.219 | 0.194 | 0.404 | 0.264 |
| 0.523 | 0.298 | 0.477 | 0.258 | 0.419 | 0.879 | 0.549 |
| 0.046 | 0.495 | 0.562 | 0.615 | 0.662 | 1.078 | 0.724 |
| −0.431 | 0.589 | 0.699 | 0.394 | 0.706 | 1.176 | 0.685 |
| −0.908 | 0.732 | 0.784 | 0.708 | 0.793 | 0.929 | 0.886 |
| −1.386 | 0.972 | 0.832 | 0.958 | 0.812 | 1.292 | 0.871 |
| −1.863 | 0.887 | 0.924 | 1.051 | 1.019 | 1.014 | 1.126 |

| | | | |
|---|---|---|---|
| Conc (exp | | | |
| 10) (nM) | WV-2118 | WV-2119 | WV-2120 |

| | | | | | | |
|---|---|---|---|---|---|---|
| 1.477 | 0.350 | 0.242 | 0.285 | 0.254 | 0.442 | 0.323 |
| 1.000 | 0.521 | 0.310 | 0.358 | 0.297 | 0.651 | 0.246 |
| 0.523 | 0.936 | 0.534 | 0.877 | 0.811 | 0.548 | 0.477 |
| 0.046 | 1.808 | 0.629 | 1.252 | 1.005 | 1.096 | 0.706 |
| −0.431 | 1.296 | 0.777 | 1.204 | 0.900 | 1.033 | 0.722 |
| −0.908 | 0.869 | 1.080 | 0.737 | 0.761 | 0.951 | 0.735 |
| −1.386 | 0.865 | 0.830 | 0.910 | 1.009 | 0.946 | 0.809 |
| −1.863 | 0.968 | 1.029 | 1.318 | 1.071 | 1.094 | 0.864 |

| | | | |
|---|---|---|---|
| Conc (exp | | | |
| 10) (nM) | WV-2121 | WV-2122 | WV-2123 |

| | | | | | | |
|---|---|---|---|---|---|---|
| 1.477 | 0.528 | 0.355 | 0.316 | 0.267 | 0.257 | 0.260 |
| 1.000 | 0.339 | 0.228 | 0.415 | 0.212 | 0.377 | 0.298 |
| 0.523 | 0.622 | 0.349 | 0.553 | 0.439 | 0.310 | 0.347 |
| 0.046 | 0.808 | 0.687 | 1.331 | 0.564 | 0.508 | 0.730 |
| −0.431 | 1.008 | 0.706 | 0.960 | 0.714 | 0.716 | 0.643 |
| −0.908 | 0.700 | 0.797 | 1.011 | 1.014 | 0.742 | 0.730 |
| −1.386 | 1.124 | 0.835 | 1.158 | 0.883 | 0.728 | 0.774 |
| −1.863 | 1.148 | 1.026 | 0.898 | 0.926 | 0.835 | 1.142 |

| Conc (exp | | | | | | |
|---|---|---|---|---|---|---|
| 10) (nM) | WV-2124 | | WV-2126 | | WV-1422 IC50 = 0.29 nM | |
| 1.477 | 0.333 | 0.314 | 0.258 | 0.294 | 0.100 | 0.131 |
| 1.000 | 0.408 | 0.260 | 0.210 | 0.248 | 0.182 | 0.170 |
| 0.523 | 0.390 | 0.283 | 0.355 | 0.342 | 0.245 | 0.230 |
| 0.046 | 0.492 | 0.439 | 0.572 | 0.520 | 0.293 | 0.353 |
| −0.431 | 1.139 | 0.533 | 0.754 | 0.636 | 0.451 | 0.528 |
| −0.908 | 0.713 | 0.683 | 0.796 | 0.692 | 0.600 | 0.591 |
| −1.386 | 1.054 | 0.915 | 1.240 | 0.736 | 0.756 | 0.693 |
| −1.863 | 0.902 | 0.987 | 0.886 | 0.885 | | |

[1781] Table 57. Table 57 shows in vitro efficacy of different ASOs, which target APOC3. Oligonucleotides tested are: WV-2128 to WV-2139, and WV-1868. The oligonucleotides have different but overlapping base sequences.

TABLE 57
Activity of oligonucleotides.

| | | | |
|---|---|---|---|
| Conc (exp | | | |
| 10) (nM) | WV-2128 | WV-2129 | WV-2130 |

| | | | | | | |
|---|---|---|---|---|---|---|
| 1.477 | 0.224 | 0.270 | 0.214 | 0.239 | 0.231 | 0.227 |
| 1.000 | 0.246 | 0.210 | 0.201 | 0.194 | 0.385 | 0.303 |
| 0.523 | 0.405 | 0.480 | 0.318 | 0.326 | 0.540 | 0.447 |
| 0.046 | 0.550 | 0.564 | 0.547 | 0.534 | 0.751 | 0.862 |
| −0.431 | 0.968 | 0.865 | 0.742 | 0.835 | 0.910 | 1.249 |
| −0.908 | 0.955 | 0.948 | 0.909 | 0.812 | 1.003 | 1.267 |
| −1.386 | 0.907 | 1.074 | 0.964 | 0.990 | 1.007 | 1.031 |
| −1.863 | 1.007 | 1.026 | 1.118 | 1.016 | 1.114 | 0.965 |

| | | | |
|---|---|---|---|
| Conc (exp | | | |
| 10) (nM) | WV-2131 | WV-2132 | WV-2133 |

| | | | | | | |
|---|---|---|---|---|---|---|
| 1.477 | 0.329 | 0.339 | 0.300 | 0.279 | 0.433 | 0.287 |
| 1.000 | 0.430 | 0.329 | 0.367 | 0.404 | 0.434 | 0.355 |
| 0.523 | 0.652 | 1.132 | 0.727 | 0.918 | 0.450 | 0.565 |
| 0.046 | 0.836 | 0.829 | 1.075 | 0.958 | 0.747 | 0.687 |
| −0.431 | 1.251 | 1.341 | 0.990 | 1.231 | 1.004 | 1.313 |
| −0.908 | 0.982 | 0.990 | 0.914 | 1.438 | 0.989 | 0.917 |
| −1.386 | 1.011 | 1.033 | 1.049 | 1.095 | 1.100 | 1.013 |
| −1.863 | 1.058 | 0.894 | 0.973 | 1.010 | 0.937 | 0.927 |

| | | | |
|---|---|---|---|
| Conc (exp | | | |
| 10) (nM) | WV-2134 | WV-2135 | WV-2136 |

| | | | | | | |
|---|---|---|---|---|---|---|
| 1.477 | 0.379 | 0.389 | 0.346 | 0.358 | 0.455 | 0.483 |
| 1.000 | 0.264 | 0.225 | 0.261 | 0.301 | 0.324 | 0.300 |
| 0.523 | 0.402 | 0.372 | 0.355 | 0.408 | 0.337 | 0.342 |
| 0.046 | 0.574 | 0.573 | 0.564 | 0.582 | 0.444 | 0.442 |
| −0.431 | 0.756 | 0.480 | 0.874 | 0.975 | 0.647 | 0.957 |
| −0.908 | 0.887 | 0.817 | 0.923 | 1.070 | 0.764 | 0.833 |
| −1.386 | 1.038 | 1.405 | 1.033 | 0.909 | 0.941 | 0.889 |
| −1.863 | 1.127 | 0.933 | 0.880 | 1.062 | 1.008 | 0.959 |

| Conc (exp | | | | | | |
|---|---|---|---|---|---|---|
| 10) (nM) | WV-2137 | | WV-2139 | | WV-1868 IC50 = 0.62 nM | |
| 1.477 | 0.425 | 0.494 | 0.377 | 0.395 | 0.119 | 0.153 |
| 1.000 | 0.292 | 0.419 | 0.302 | 0.255 | 0.121 | 0.188 |
| 0.523 | 0.308 | 0.320 | 0.328 | 0.326 | 0.291 | 0.276 |
| 0.046 | 0.432 | 0.466 | 0.658 | 0.605 | 0.389 | 0.353 |
| −0.431 | 0.615 | 0.842 | 0.958 | 0.954 | 0.618 | 0.735 |
| −0.908 | 0.957 | 0.792 | 0.847 | 0.859 | 0.797 | 0.786 |
| −1.386 | 0.940 | 0.930 | 0.941 | 0.923 | 0.955 | 0.859 |
| −1.863 | 0.894 | 1.164 | 0.886 | 1.041 | | |

[1782] Table 58. Table 58 shows in vitro efficacy of different ASOs, which target APOC3. Oligonucleotides tested are: WV-2549 to WV-2554, WV-1422, and WV-1868. The oligonucleotides differ in overall length and in the length of the wings and core, and in stereochemistry.

TABLE 58
Activity of oligonucleotides.

| Conc (exp | | | | | | |
|---|---|---|---|---|---|---|
| 10) (nM) | WV-2549 (IC50 = 4.5 nM) | | WV-2550 (5.2 nM) | | WV-2551 (5.0 nM) | |
| 1.477 | 0.280 | 0.246 | 0.442 | 0.463 | 0.323 | 0.332 |
| 1.079 | 0.383 | 0.439 | 0.666 | 0.489 | 0.545 | 0.446 |
| 0.681 | 0.544 | 0.538 | 0.810 | 0.745 | 0.699 | 0.580 |
| 0.283 | 0.718 | 0.814 | 0.937 | 0.973 | 0.914 | 0.894 |
| −0.115 | 0.826 | 0.817 | 1.075 | 1.272 | 0.802 | 0.997 |
| −0.513 | 0.830 | 1.212 | 1.106 | 1.262 | 1.057 | 1.160 |
| −0.911 | 0.840 | 1.030 | 0.949 | 1.370 | 1.024 | 1.264 |
| −1.308 | 0.859 | 1.103 | 1.014 | 1.113 | 0.993 | 1.218 |
| −1.706 | 0.987 | 1.016 | 1.177 | 0.984 | 0.966 | 1.049 |
| −2.104 | 0.942 | 0.948 | 0.835 | 1.054 | 1.022 | 1.110 |
| −2.502 | 1.182 | 1.022 | 0.982 | 0.949 | 0.942 | 0.935 |

| Conc (exp | | | | | | |
|---|---|---|---|---|---|---|
| 10) (nM) | WV-2552 (3.3 nM) | | WV-2553 (4.2 nM) | | WV-2554 (2.9 nM) | |
| 1.477 | 0.306 | 0.366 | 0.245 | 0.248 | 0.288 | 0.212 |
| 1.079 | 0.496 | 0.464 | 0.441 | 0.423 | 0.369 | 0.216 |
| 0.681 | 0.504 | 0.492 | 0.527 | 0.650 | 0.583 | 0.433 |
| 0.283 | 1.017 | 0.768 | 0.720 | 0.889 | 0.769 | 0.703 |
| −0.115 | 0.811 | 0.865 | 0.809 | 1.058 | 0.800 | 0.788 |
| −0.513 | 1.030 | 0.920 | 1.307 | 1.148 | 1.015 | 1.047 |
| −0.911 | 1.027 | 1.132 | 1.021 | 1.215 | 1.064 | 1.243 |
| −1.308 | 0.787 | 1.188 | 0.928 | 0.943 | 0.955 | 0.951 |
| −1.706 | 1.123 | 1.146 | 1.002 | 1.199 | 1.009 | 0.938 |
| −2.104 | 0.892 | 1.032 | 1.005 | 0.883 | 0.976 | 0.909 |
| −2.502 | 1.054 | 0.906 | 0.977 | 0.955 | 0.986 | 0.994 |

| Conc (exp | | | | |
|---|---|---|---|---|
| 10) (nM) | WV-1868 (1.4 nM) | | WV-1422 (1 nM) | |
| 1.477 | 0.219 | 0.185 | 0.251 | 0.226 |
| 1.079 | 0.272 | 0.189 | 0.352 | 0.322 |
| 0.681 | 0.435 | 0.323 | 0.446 | 0.461 |
| 0.283 | 0.603 | 0.492 | 0.535 | 0.713 |
| −0.115 | 0.633 | 0.771 | 0.689 | 0.815 |
| −0.513 | 0.808 | 0.979 | 0.951 | 0.999 |
| −0.911 | 0.934 | 1.216 | 0.931 | 1.054 |
| −1.308 | 1.045 | 1.209 | 0.921 | 0.915 |
| −1.706 | 1.196 | 0.963 | 1.128 | 1.053 |
| −2.104 | 0.912 | 0.947 | 0.927 | 0.993 |
| −2.502 | 0.904 | 0.948 | 0.945 | 0.955 |

IC50 for various oligonucleotides is presented in parentheses after the oligonucleotide designation.

[1783] Table 59. Table 59 shows in vitro efficacy of different ASOs, which target APOC3. The oligonucleotides differ in overall length and in the length of the wings and core, and in stereochemistry.

TABLE 59
Activity of oligonucleotides.

| Conc (exp | | | | | | |
|---|---|---|---|---|---|---|
| 10) (nM) | WV-2549 1.76 nM | | WV-2550 3.1 nM | | WV-2551 1.8 nM | |
| 1.477 | 0.368 | 0.473 | 0.435 | 0.499 | 0.444 | 0.446 |
| 1.079 | 0.482 | 0.479 | 0.472 | 0.550 | 0.390 | 0.365 |
| 0.681 | 0.614 | 0.558 | 0.656 | 0.685 | 0.432 | 0.421 |
| 0.283 | 0.759 | 0.613 | 0.812 | 0.842 | 0.742 | 0.672 |
| −0.115 | 0.843 | 0.927 | 0.995 | 0.977 | 0.847 | 0.842 |
| −0.513 | 0.858 | 1.102 | 1.094 | 1.096 | 0.869 | 0.948 |
| −0.911 | 0.972 | 1.262 | 1.044 | 1.109 | 0.941 | 1.035 |
| −1.308 | 1.025 | 1.047 | 1.015 | 1.085 | 1.047 | 1.016 |
| −1.706 | 1.086 | 1.098 | 0.969 | 1.041 | 0.976 | 0.909 |
| −2.104 | 0.889 | 0.856 | 1.017 | 0.908 | 0.978 | 0.881 |

| Conc (exp | | | | | | |
|---|---|---|---|---|---|---|
| 10) (nM) | WV-2552 1.8 nM | | WV-2553 1.4 nM | | WV-2554 1.3 nM | |
| 1.477 | 0.643 | 0.438 | 0.303 | 0.303 | 0.227 | 0.262 |
| 1.079 | 0.497 | 0.376 | 0.349 | 0.238 | 0.215 | 0.199 |
| 0.681 | 0.519 | 0.454 | 0.441 | 0.394 | 0.326 | 0.295 |
| 0.283 | 0.755 | 0.694 | 0.627 | 0.509 | 0.543 | 0.477 |
| −0.115 | 1.022 | 0.868 | 0.807 | 0.610 | 0.710 | 0.641 |
| −0.513 | 1.093 | 0.958 | 0.962 | 0.811 | 0.836 | 0.847 |
| −0.911 | 0.989 | 1.142 | 0.997 | 0.964 | 0.856 | 0.986 |
| −1.308 | 1.037 | 1.109 | 1.045 | 1.006 | 1.021 | 0.935 |
| −1.706 | 1.031 | 0.873 | 0.922 | 0.809 | 1.019 | 0.821 |
| −2.104 | 0.932 | 0.795 | 1.033 | 0.836 | 0.960 | 0.869 |
| Conc (exp | | | | | | |
| 10) (nM) | WV-2677 1.5 nM | | WV-2678 1.8 nM | | WV-1422 1.1 nM | |
| 1.477 | 0.214 | 0.151 | 0.293 | 0.240 | 0.404 | 0.369 |
| 1.079 | 0.214 | 0.148 | 0.321 | 0.240 | 0.416 | 0.436 |
| 0.681 | 0.388 | 0.265 | 0.456 | 0.386 | 0.490 | 0.496 |
| 0.283 | 0.538 | 0.406 | 0.616 | 0.535 | 0.794 | 0.650 |
| −0.115 | 0.779 | 0.592 | 0.959 | 0.748 | 0.716 | 0.851 |
| −0.513 | 0.836 | 0.920 | 0.883 | 1.006 | 0.809 | 0.987 |
| −0.911 | 0.926 | 1.043 | 1.016 | 1.135 | 1.070 | 1.107 |
| −1.308 | 1.037 | 0.816 | 1.045 | 0.930 | 1.176 | 0.996 |
| −1.706 | 1.071 | 0.766 | 1.178 | 0.873 | | |
| −2.104 | 0.892 | 0.742 | 0.778 | 0.839 | | |

| | |
|---|---|
| Conc (exp | |
| 10) (nM) | WV-1868 1.65 nM |

| | | |
|---|---|---|
| 1.477 | 0.262 | 0.332 |
| 1.079 | 0.358 | 0.308 |
| 0.681 | 0.378 | 0.520 |
| 0.283 | 0.498 | 0.659 |
| −0.115 | 0.813 | 0.809 |
| −0.513 | 1.120 | 0.947 |
| −0.911 | 0.824 | 0.964 |
| −1.308 | | |
| −1.706 | | |
| −2.104 | | |

The IC50 is presented after the designation of the oligonucleotide.

[1784] Table 60. Tables 60A to H show the efficacy and stability of different ASOs, which target APOC3. Oligonucleotides tested are: Table 60A, WV-2551, WV-2553, WV-2554, WV-2678, WV-2677, and WV-1868. The oligonucleotides differ in the length of the wings and core, and in stereochemistry.

TABLE 60A
Activity of oligonucleotides.

| Conc (exp | | | | | | |
|---|---|---|---|---|---|---|
| 10) (nM) | WV-2549 1.76 nM | | WV-2550 3.1 nM | | WV-2551 1.8 nM | |
| 1.477 | 0.368 | 0.473 | 0.435 | 0.499 | 0.444 | 0.446 |
| 1.079 | 0.482 | 0.479 | 0.472 | 0.550 | 0.390 | 0.365 |
| 0.681 | 0.614 | 0.558 | 0.656 | 0.685 | 0.432 | 0.421 |
| 0.283 | 0.759 | 0.613 | 0.812 | 0.842 | 0.742 | 0.672 |
| −0.115 | 0.843 | 0.927 | 0.995 | 0.977 | 0.847 | 0.842 |
| −0.513 | 0.858 | 1.102 | 1.094 | 1.096 | 0.869 | 0.948 |
| −0.911 | 0.972 | 1.262 | 1.044 | 1.109 | 0.941 | 1.035 |
| −1.308 | 1.025 | 1.047 | 1.015 | 1.085 | 1.047 | 1.016 |
| −1.706 | 1.086 | 1.098 | 0.969 | 1.041 | 0.976 | 0.909 |
| −2.104 | 0.889 | 0.856 | 1.017 | 0.908 | 0.978 | 0.881 |

| Conc (exp | | | | | | |
|---|---|---|---|---|---|---|
| 10) (nM) | WV-2552 1.8 nM | | WV-2553 1.4 nM | | WV-2554 1.3 nM | |
| 1.477 | 0.643 | 0.438 | 0.303 | 0.303 | 0.227 | 0.262 |
| 1.079 | 0.497 | 0.376 | 0.349 | 0.238 | 0.215 | 0.199 |
| 0.681 | 0.519 | 0.454 | 0.441 | 0.394 | 0.326 | 0.295 |
| 0.283 | 0.755 | 0.694 | 0.627 | 0.509 | 0.543 | 0.477 |
| −0.115 | 1.022 | 0.868 | 0.807 | 0.610 | 0.710 | 0.641 |
| −0.513 | 1.093 | 0.958 | 0.962 | 0.811 | 0.836 | 0.847 |
| −0.911 | 0.989 | 1.142 | 0.997 | 0.964 | 0.856 | 0.986 |
| −1.308 | 1.037 | 1.109 | 1.045 | 1.006 | 1.021 | 0.935 |
| −1.706 | 1.031 | 0.873 | 0.922 | 0.809 | 1.019 | 0.821 |
| −2.104 | 0.932 | 0.795 | 1.033 | 0.836 | 0.960 | 0.869 |

| Conc (exp | | | | | | |
|---|---|---|---|---|---|---|
| 10) (nM) | WV-2677 1.5 nM | | WV-2678 1.8 nM | | WV-1422 All PS 1.1 nM | |
| 1.477 | 0.214 | 0.151 | 0.293 | 0.240 | 0.404 | 0.369 |
| 1.079 | 0.214 | 0.148 | 0.321 | 0.240 | 0.416 | 0.436 |
| 0.681 | 0.388 | 0.265 | 0.456 | 0.386 | 0.490 | 0.496 |
| 0.283 | 0.538 | 0.406 | 0.616 | 0.535 | 0.794 | 0.650 |
| −0.115 | 0.779 | 0.592 | 0.959 | 0.748 | 0.716 | 0.851 |
| −0.513 | 0.836 | 0.920 | 0.883 | 1.006 | 0.809 | 0.987 |
| −0.911 | 0.926 | 1.043 | 1.016 | 1.135 | 1.070 | 1.107 |
| −1.308 | 1.037 | 0.816 | 1.045 | 0.930 | 1.176 | 0.996 |
| −1.706 | 1.071 | 0.766 | 1.178 | 0.873 | | |
| −2.104 | 0.892 | 0.742 | 0.778 | 0.839 | | |

| Conc (exp | | |
|---|---|---|
| 10) (nM) | WV-1868 PS/PO 1.65 nM | |
| 1.477 | 0.262 | 0.332 |
| 1.079 | 0.358 | 0.308 |
| 0.681 | 0.378 | 0.520 |
| 0.283 | 0.498 | 0.659 |
| −0.115 | 0.813 | 0.809 |
| −0.513 | 1.120 | 0.947 |
| −0.911 | 0.824 | 0.964 |
| −1.308 | | |
| −1.706 | | |
| −2.104 | | |

The IC50 is presented after the designation of the oligonucleotide.

[1785] As shown in Table 60B, WV-1878, WV-1868, and WV-1871 were tested in vitro. The oligonucleotides differ in the length of the wings and core, and in base sequence.

TABLE 60B
Activity of oligonucleotides.

| Oligonucleotide | IC50 (nM) |
|---|---|
| WV-1878 | 2.1 |
| WV-1868 | 0.76 |
| WV-1871 | 2.7 |

[1786] As shown in Table 60C, WV-2141 and WV-3968 were tested in vitro.

TABLE 60C
Activity of oligonucleotides.

| | | |
|---|---|---|
| Conc (uM) | WV-2141 | WV-3968 |

| | | | | |
|---|---|---|---|---|
| 0 | 87.9 | 93.1 | 87.9 | 93.1 |
| 1 | 97.9 | 80.6 | 32.7 | 45.6 |
| 5 | 56.6 | 67.4 | 42.6 | 29.6 |
| 10 | 47.7 | 68.1 | 41.3 | 59.5 |

Numbers indicate % APOC3 mRNA remaining (AOC3/HPRT1). The 5′ end of WV-3968 comprises a Mod001 moiety (as defined in the legend to Table 1A) and a linker L001.

[1787] As shown in Table 60D, WV-2647, WV-2647, WV-2552, WV-2551, WV-2549, WV-2550, WV-2554, WV-2553, WV-2646, WV-2645, WV-1422, WV-2677, WV-723, WV-2678, WV-1868, WV-819, and WV-2644 were tested for stability in vitro.

TABLE 60D
Stability of oligonucleotides.

| Days | WV723-1 | WV723-2 | WV723-3 |
|---|---|---|---|
| 0 | 100 | 100 | 100 |
| 0.333 | 49.09815078 | 50.75705 | 46.66902 |
| 0.666 | 42.56045519 | 44.04259 | 40.76915 |
| 1 | 39.58463727 | 38.01295 | 36.69628 |
| 2 | 28.35277383 | 26.27468 | 27.87928 |
| 3 | 19.93172119 | 23.00572 | 22.19643 |
| 4 | 16.17638691 | 15.66529 | 16.07449 |
| 5 | 14.685633 | 13.81414 | 12.93025 |

| Days | WV819-1 | WV819-2 | WV819-3 |
|---|---|---|---|
| 0 | 100 | 100 | 100 |
| 0.333 | 43.51021872 | 46.65438 | 44.26357 |
| 0.666 | 38.36052349 | 39.37896 | 36.76867 |
| 1 | 32.56095375 | 37.27138 | 30.99551 |
| 2 | 21.00215131 | 23.34067 | 22.01958 |
| 3 | 15.66869846 | 16.55507 | 16.09547 |
| 4 | 13.55324489 | 18.68961 | 12.27254 |
| 5 | 10.54141269 | 12.78929 | 9.277846 |

| Days | WV1422-1 | WV1422-2 | WV1422-3 |
|---|---|---|---|
| 0 | 100 | 100 | 100 |
| 0.333 | 70.51666845 | 67.40684 | 62.96961 |
| 0.666 | 59.69557294 | 53.65779 | 52.61469 |
| 1 | 50.13399078 | 49.47022 | 46.16292 |
| 2 | 34.19980705 | 32.08112 | 31.21106 |
| 3 | 25.71551077 | 23.65526 | 22.862 |
| 4 | 22.55332833 | 20.25856 | 19.36473 |
| 5 | 17.25801265 | 14.45374 | 15.72116 |
| Days | WV1868-1 | WV1868-2 | WV1422-3 |
| 0 | 100 | 100 | 100 |
| 0.333 | 67.74587087 | 69.0377 | 65.87368 |
| 0.666 | 51.09797297 | 51.80944 | 51.05068 |
| 1 | 40.01814314 | 40.39831 | 40.40356 |
| 2 | 22.76338839 | 22.60573 | 20.85249 |
| 3 | 14.17042042 | 14.52475 | 13.57829 |
| 4 | 10.12575075 | 8.851996 | 9.154677 |
| 5 | 6.969469469 | 6.791561 | 6.716017 |
| Days | WV2549-1 | WV2549-2 | WV2549-3 |
| 0 | 100 | 100 | 100 |
| 0.333 | 93.91357898 | 92.79193 | 93.26989 |
| 0.666 | 92.45612234 | 88.80706 | 91.78848 |
| 1 | 86.59550446 | 86.70366 | 85.23006 |
| 2 | 74.17119984 | 76.55485 | 74.57078 |
| 3 | 67.43816073 | 67.03657 | 66.13362 |
| 4 | 59.98665709 | 57.77554 | 56.80859 |
| 5 | 48.6246536 | 46.3657 | 47.62092 |
| Days | WV2550-1 | WV2550-2 | WV2550-3 |
| 0 | 100 | 100 | 100 |
| 0.333 | 95.48114142 | 93.89125 | 89.39343 |
| 0.666 | 93.0236745 | 86.26168 | 86.79865 |
| 1 | 85.48024125 | 81.28292 | 82.89806 |
| 2 | 72.32874246 | 69.37978 | 67.81803 |
| 3 | 57.33189306 | 55.57349 | 55.64448 |
| 4 | 50.21154019 | 47.66355 | 47.21146 |
| 5 | 38.4463048 | 36.25319 | 38.91323 |
| Days | WV2551-1 | WV2551-2 | WV2551-3 |
| 0 | 100 | 100 | 100 |
| 0.333 | 92.39859107 | 94.76026 | 95.3919 |
| 0.666 | 90.27383252 | 92.22383 | 88.72739 |
| 1 | 87.85365299 | 88.97541 | 86.35874 |
| 2 | 78.17293489 | 79.9644 | 73.86951 |
| 3 | 66.67424156 | 66.80387 | 68.57235 |
| 4 | 60.27724122 | 59.30582 | 58.3441 |
| 5 | 49.80115896 | 49.6162 | 50.49526 |
| Days | WV2552-1 | WV2552-2 | WV2552-3 |
| 0 | 100 | 100 | 100 |
| 0.333 | 90.98589239 | 97.80328 | 99.99086 |
| 0.666 | 88.69750656 | 96.01004 | 96.23538 |
| 1 | 84.4488189 | 88.01219 | 95.87902 |
| 2 | 70.97276903 | 80.59715 | 84.91411 |
| 3 | 63.32841207 | 64.88837 | 74.57968 |
| 4 | 57.58694226 | 60.21698 | 64.41886 |
| 5 | 46.05479003 | 53.39371 | 55.2723 |
| Days | WV2553-1 | WV2553-2 | WV2553-3 |
| 0 | 100 | 100 | 100 |
| 0.333 | 92.2305438 | 97.18409 | 90.91079 |
| 0.666 | 90.83034842 | 84.13727 | 84.48244 |
| 1 | 77.52523608 | 77.0109 | 80.18029 |
| 2 | 65.01465321 | 65.03528 | 62.86602 |
| 3 | 55.49332465 | 53.52149 | 54.65962 |
| 4 | 45.88733312 | 42.96985 | 41.46099 |
| 5 | 33.82611527 | 34.58627 | 33.76438 |
| Days | WV2554-1 | WV2554-2 | WV2554-3 |
| 0 | 100 | 100 | 100 |
| 0.333 | 94.79862111 | 97.72837 | 95.30518 |
| 0.666 | 98.32002444 | 90.65912 | 90.90406 |
| 1 | 138.9448881 | 85.30018 | 83.4213 |
| 2 | 66.28267225 | 69.27597 | 69.07721 |
| 3 | 55.59191866 | 56.75569 | 56.33779 |
| 4 | 45.70406249 | 44.59501 | 44.68801 |
| 5 | 32.78352315 | 34.10078 | 34.8472 |
| Days | WV2644-1 | WV2644-2 | WV2644-3 |
| 0 | 100 | 100 | 100 |
| 0.333 | 0.059184568 | 0.088216 | 0.068567 |
| 0.666 | 0.026304253 | 0.050724 | 0.063293 |
| 1 | 0.026304253 | 0.02867 | 0.031646 |
| Days | WV2645-1 | WV2645-2 | WV2645-3 |
| 0 | 100 | 100 | 100 |
| 0.333 | 73.70322969 | 80.76862 | 79.76236 |
| 0.666 | 68.32793797 | 72.95462 | 70.16434 |
| 1 | 59.60249944 | 61.37744 | 59.47844 |
| 2 | 38.09380411 | 42.64941 | 40.05864 |
| 3 | 24.79861477 | 25.3116 | 25.41471 |
| 4 | 15.38056162 | 16.08341 | 15.97871 |
| 5 | 10.11066777 | 10.11505 | 10.07638 |
| Days | WV2646-1 | WV2646-2 | WV2646-3 |
| 0 | 100 | 100 | 100 |
| 0.333 | 70.8897207 | 71.01162 | 68.12728 |
| 0.666 | 64.49035416 | 60.79626 | 59.61305 |
| 1 | 53.49841635 | 53.76877 | 49.8854 |
| 2 | 32.93982148 | 33.63559 | 34.01645 |
| 3 | 23.74748056 | 23.42732 | 23.40569 |
| 4 | 15.99481716 | 16.70445 | 16.24646 |
| 5 | 17.77281889 | 11.52593 | 12.8219 |
| Days | WV2647-1 | WV2647-2 | WV2647-3 |
| 0 | 100 | 100 | 100 |
| 0.333 | 91.14885115 | 91.36755 | 88.88889 |
| 0.666 | 94.40559441 | 87.56281 | 88.5921 |
| 1 | 88.15184815 | 83.3094 | 85.51289 |
| 2 | 84.31568432 | 78.24838 | 80.50454 |
| 3 | 79.000999 | 71.30294 | 74.23484 |
| 4 | 74.64535465 | 67.13927 | 69.24504 |
| 5 | 72.76723277 | 63.87294 | 65.7021 |
| Days | WV2677-2 | WV2677-2 | WV2677-3 |
| 0 | 100 | 100 | 100 |
| 0.333 | 74.16923604 | 68.33221 | 79.12078 |
| 0.666 | 56.90733128 | 54.40283 | 60.87654 |
| 1 | 46.88677629 | 45.06097 | 51.94168 |
| 2 | 31.20075368 | 28.98677 | 36.2923 |
| 3 | 24.36193902 | 22.31004 | 26.17147 |
| 4 | 17.72439192 | 17.54776 | 20.2684 |
| 5 | 15.74169236 | 14.89057 | 15.422 |
| Days | WV2678-1 | WV2678-2 | WV2678-3 |
| 0 | 100 | 100 | 100 |
| 0.333 | 66.0880372 | 64.71483 | 59.23107 |
| 0.666 | 45.11706222 | 45.80369 | 46.8807 |
| 1 | 36.52581783 | 38.74748 | 36.68648 |
| 2 | 23.66500962 | 24.55282 | 25.08918 |
| 3 | 17.4390635 | 17.61997 | 17.87951 |
| 4 | 12.93296985 | 12.52519 | 13.1193 |
| 5 | 9.878127004 | 10.02508 | 10.09116 |

The oligonucleotides were incubated in rat liver homogenate at 20 uM for 0 d (0 days), 8h (8 hours), 16h, 1 d, 2 d, 3 d, 4 d, or 5 d and the remained full length oligonucleotides were plotted in percentage. Numbers indicate percentage of full-length oligonucleotide remaining. For example, in column 2, row 2, 100 indicates 100% full-length oligonucleotide remaining. Data from replicate experiments (e.g., −1, −2, etc.) are shown.

[1788] As shown in Table 60E, WV-2725, WV-2726, WV-2727, WV-2722, WV-2723, and WV-2724 were tested for stability in vivo.

TABLE 60E
Stability of oligonucleotides in liver.

| Days | PBS | WV-2725 | WV-2726 | WV-2727 | WV-2722 | WV-2723 | WV-2724 |
|---|---|---|---|---|---|---|---|
| 1 | 2 | 36 | 75 | 51 | 35 | 49 | 39 |
| 5 | | 26 | 43 | 33 | 19 | 26 | 15 |
| 15 | 2 | 7 | 13 | 11 | 4 | 7 | 4 |

Numbers indicate ug/g of ASO in liver at a number of days after injection into test animals. Numbers are approximate and error bars are not shown. Approximately 75 ug/g represents about 90% of the injected dose, and about 13 ug/g represents about 16% of the injected dose. The oligonucleotides differ in stereochemistry pattern and 2′-modifications.

[1789] As shown in Table 60F and 60G, WV-3968 and WV-6003 were tested. The 5′ end of WV-3968 and that of WV-6003 comprise a Mod001 moiety (as defined in the legend to Table 1A) and a linker L001:

[chemical structure]

Data represent relative hAPOC3 protein levels (relative to PBS)

TABLE 60F
Part I. Activity of oligonucleotides.

| | Stereorandom | | | | |
|---|---|---|---|---|---|
| Day | WV-3968 | | | | |
| 8 | 0.062 | 0.013 | 0.018 | 0.016 | 0.035 |
| 15 | 0.017 | 0.009 | 0.01 | 0.012 | 0.014 |
| 22 | 0.039 | 0.027 | 0.019 | 0.023 | 0.023 |
| 29 | 0.153 | 0.043 | 0.021 | 0.06 | 0.072 |
| 35 | 0.096 | 0.172 | 0.088 | 0.172 | 0.09 |
| 42 | 0.304 | 0.228 | 0.209 | 0.317 | 0.402 |
| 50 | 0.396 | 0.459 | 0.02 | 0.351 | 0.165 |
| 57 | 1.038 | 1.223 | 0.623 | 0.792 | 0.654 |
| 64 | 1.011 | 0.92 | 0.458 | 0.621 | 0.551 |
| | Stereopure | | | | |
| Day | WV-6003 | | | | |
| 8 | 0.016 | 0.043 | 0.032 | 0.039 | 0.016 |
| 15 | 0.015 | 0.016 | 0.021 | 0.024 | 0.021 |
| 22 | 0.033 | 0.039 | 0.051 | 0.047 | 0.027 |
| 29 | 0.023 | 0.031 | 0.046 | 0.096 | 0.048 |
| 35 | 0.266 | 0.159 | 0.067 | 0.176 | 0.239 |
| 42 | 0.104 | 0.084 | 0.069 | 0.084 | 0.067 |
| 50 | 0.072 | 0.193 | 0.065 | 0.133 | 0.064 |
| 57 | 0.334 | 0.782 | 0.381 | 0.519 | 0.21 |
| 64 | 0.397 | 0.754 | 0.543 | 0.699 | 0.239 |

TABLE 60F
Part II. Activity of oligonucleotides.

| | Stereorandom | | | | |
|---|---|---|---|---|---|
| Day | WV-3968 | | | | |
| 8 | 0.062 | 0.013 | 0.018 | 0.016 | 0.035 |
| 15 | 0.017 | 0.009 | 0.01 | 0.012 | 0.014 |
| 22 | 0.039 | 0.027 | 0.019 | 0.023 | 0.023 |
| 29 | 0.153 | 0.043 | 0.021 | 0.06 | 0.072 |
| 35 | 0.096 | 0.172 | 0.088 | 0.172 | 0.09 |
| 50 | 0.396 | 0.459 | 0.02 | 0.351 | 0.165 |
| 64 | 0.873 | 1.34 | 0.407 | 0.613 | 0.492 |
| 78 | 0.904 | 1.971 | 1.292 | 1.611 | 0.638 |
| | Stereopure | | | | |
| Day | WV-6003 | | | | |
| 8 | 0.016 | 0.043 | 0.032 | 0.039 | 0.016 |
| 15 | 0.015 | 0.016 | 0.021 | 0.024 | 0.021 |
| 22 | 0.033 | 0.039 | 0.051 | 0.047 | 0.027 |
| 29 | 0.023 | 0.031 | 0.046 | 0.096 | 0.048 |
| 35 | 0.266 | 0.159 | 0.067 | 0.176 | 0.239 |
| 50 | 0.072 | 0.193 | 0.065 | 0.133 | 0.064 |
| 64 | 0.43 | 0.591 | 0.401 | 0.235 | 0.12 |
| 78 | 0.399 | 0.669 | 0.557 | 1.358 | 0.442 |

Data represent relative hAPOC3 protein levels (relative to PBS).
In some experiments, compounds were constructed which comprise an APOC3 oligonucleotide (WV-7107) conjugated to a mono-, bis- or tri-antennary GalNAc (also designated Ref. GalNAc or Reference GalNAc) or PFE ligand (also described as PFE ASPGR ligand, PFE GalNAc, bridged bicyclic ketal or bicyclic ligand).
Oligonucleotides tested are listed in Table 60G, Part I

TABLE 60G
Part I. List of oligonucleotides

| | | | | Example |
|---|---|---|---|---|
| | | Alternative | Example | describing |
| | | designation | describing | example |
| | | of ligand and | example | synthesis of |
| Oligo- | | linker (L001 | synthesis | oligonucleotide |
| nucleotide | Ligand | is a linker) | of ligand | with ligand |
| WV-8877 | None | — | — | — |
| WV-7107 | None | — | — | 37A |
| WV-6558 | Ref. GalNAc | Mod001L001 | 38 | 37A, 37B |
| | Tri-antennary | | (protected | |
| | | | version) | |
| WV-9542 | PFE ligand | Mod083L001 | 31, 40 | 37C |
| | Tri-antennary | | | |
| WV-9543 | Ref. GalNAc | Mod079L001 | 35 | 37D |
| | Bis-antennary | | (protected | |
| | | | version) | |
| WV-9544 | PFE ligand | Mod080L001 | 32, 33 | 37E |
| | Bis-antennary | | | |
| WV-9545 | Ref. GalNAc | Mod081L001 | 36 | 37F |
| | Mono- | | (protected | |
| | antennary | | version) | |
| WV-9546 | PFE ligand | Mod082L001 | 34 | 37G |
| | Mono- | | | |
| | antennary | | | |

Ref GalNAc Tri-antennary is also designated Tri-GalNAc; PFE ligand Tri-antennary is also designated Tri-PFE ligand; Ref. GalNAc Bis-antennary is also designated Bis-GalNAc; PFE ligand Bis-antennary is also designated Bis-PFE ligand; Ref. GalNAc Mono-antennary is also designated Mono-GalNAc; and PFE ligand Mono-antennary is also designated Mono-PFE ligand. The structures of Mod001, Mod079, Mod080, Mod081, Mod082, Mod083 and L001 are provided in the legend to Table 1A and in other texts herein. Ligands are also described in Example 27. Mod083 is also described in Example 4A and 4B. The GalNAc structures in Examples 29, 35, and 36 represent the protected versions, as they comprise —OAc (—O-acetate groups). In construction of the listed oligonucleotides, the Ac groups are removed during de-protection following conjugation of the compound to the oligonucleotide. De-protection is performed, for example, with concentrated ammonium hydroxide, e.g., as described in Example 37B. In the de-protected versions of these structures, —OAc is replaced by —OH.
WV-8877 (negative control) targets a different gene, which is not APOC3 or PNPLA3.
The APOC3 oligonucleotide WV-7107, conjugated with GalNAc or PFE ligand at different valencies (mono, bis or triantennary) and the negative control were separately administered to Tg (transgenic) mice harboring the human APOC3 transgene (B6.Cg-Tg(APOC3)2Bres/J) on day 1, and APOC3 knockdown was monitored by serum hAPOC3 protein reduction.

TABLE 60G
Part II. Activity of oligonucleotides

| Day | 0 | 8 | 15 | 22 | 29 | 36 | 43 | 50 |
|---|---|---|---|---|---|---|---|---|
| PBS | 1.52 | 0.95 | 1.50 | 0.56 | 0.96 | 1.07 | 1.57 | 1.74 |
| | 0.59 | 0.73 | 0.74 | 0.87 | 0.90 | 0.90 | 0.73 | 0.71 |
| | 1.21 | 0.99 | 1.10 | 1.34 | 0.89 | 0.82 | 0.62 | 0.78 |
| | 0.67 | 1.14 | 0.89 | 0.99 | 0.89 | 0.86 | 0.95 | 0.86 |
| | 1.01 | 1.20 | 0.76 | 1.24 | 1.35 | 1.36 | 1.13 | 0.91 |
| WV-8877 | 1.56 | 1.24 | 1.67 | 1.59 | 2.37 | 1.56 | 1.47 | 2.27 |
| | 0.78 | 0.73 | 0.85 | 0.80 | 1.15 | 0.61 | 0.75 | 1.19 |
| | 1.08 | 0.81 | 1.42 | | 1.84 | 1.21 | 1.73 | 3.05 |
| | 0.71 | 1.21 | 0.74 | 0.62 | 1.02 | 1.07 | 0.95 | 1.48 |
| | 1.28 | 1.21 | 0.60 | 0.80 | 1.13 | 1.50 | 0.86 | |
| WV-6558 | 2.74 | 0.06 | 0.05 | 0.06 | 0.11 | 0.38 | 0.69 | 1.43 |
| | 1.15 | 0.17 | 0.05 | 0.04 | 0.09 | 0.27 | 0.01 | 0.81 |
| | 0.38 | 0.04 | 0.05 | 0.10 | 0.18 | 0.45 | 0.53 | 1.07 |
| | 0.44 | | | | | | | |
| | 0.41 | 0.04 | 0.04 | 0.08 | 0.09 | 0.11 | 0.13 | 0.22 |
| WV-9542 | 1.10 | 0.23 | 0.05 | 0.07 | 0.13 | 0.23 | 0.32 | 0.78 |
| | 0.71 | 0.03 | 0.02 | 0.04 | 0.06 | 0.09 | 0.20 | 0.28 |
| | 0.59 | 0.05 | 0.04 | 0.08 | 0.16 | 0.72 | 0.90 | 0.80 |
| | 0.32 | 0.03 | 0.02 | 0.04 | 0.09 | 0.37 | 0.54 | 0.55 |
| | 0.40 | 0.03 | 0.03 | 0.06 | 0.21 | 0.39 | 0.49 | 0.58 |
| WV-9543 | 0.48 | 0.03 | 0.05 | 0.09 | 0.08 | 0.21 | 0.27 | 0.49 |
| | 1.19 | 0.06 | 0.06 | 0.09 | 0.06 | 0.09 | 0.57 | 0.96 |
| | 0.79 | 0.05 | 0.04 | 0.17 | 0.06 | 0.15 | 0.42 | 0.80 |
| | 0.79 | 0.09 | 0.03 | 0.28 | 0.20 | 0.17 | 0.28 | 0.59 |
| | 0.48 | 0.04 | 0.02 | 0.08 | 0.06 | 0.12 | 0.17 | 0.32 |
| WV-9544 | 0.91 | | 0.04 | 0.06 | 0.06 | 0.19 | 0.26 | 0.67 |
| | 0.94 | 0.10 | 0.03 | 0.08 | 0.09 | 0.15 | 0.34 | 0.76 |
| | 1.72 | 0.19 | 0.04 | 0.07 | 0.09 | 0.25 | 0.60 | 0.83 |
| | 1.92 | 0.28 | 0.07 | 0.10 | 0.11 | 0.13 | 0.26 | 0.56 |
| | 0.81 | 0.04 | 0.05 | 0.11 | 0.12 | 0.20 | 0.32 | 0.73 |
| WV-9545 | 0.49 | 0.03 | 0.07 | 0.16 | 0.21 | 0.32 | 0.66 | 0.60 |
| | 1.14 | 0.22 | 0.04 | 0.10 | 0.15 | 0.58 | 0.76 | 0.97 |
| | 0.58 | 0.03 | 0.04 | 0.15 | 0.27 | 0.67 | 1.16 | 0.97 |
| | 0.64 | 0.03 | 0.04 | 0.19 | 0.42 | 0.98 | 1.38 | 0.96 |
| | 0.60 | 0.05 | 0.03 | 0.08 | | | | |
| WV-9546 | 3.33 | 0.20 | 0.06 | 0.27 | 0.24 | 0.49 | 1.13 | 1.31 |
| | 1.03 | 0.11 | 0.04 | 0.09 | 0.14 | 0.46 | 0.55 | 0.68 |
| | 1.20 | 0.28 | 0.12 | 0.20 | 0.31 | 0.95 | 1.75 | 1.39 |
| | 0.71 | 0.15 | 0.04 | 0.19 | 0.39 | 0.26 | 0.75 | 0.36 |
| | 0.18 | 0.04 | 0.02 | 0.20 | 0.28 | 0.21 | 0.56 | 0.56 |

In this experiment, all oligonucleotides were administered to animals at a 3 mg/kg single dose (s.c.) at day 1. In addition, WV-6558 and WV-9542 were also administered to animals at a 1 mg/kg single dose (s.c.) at day 1. Serum was collected at days 0, 8, 15, 22, 29, 36, 43, and 50. Each group contained 5 animals. PBS and WV-8877 (which targets a gene which is not APOC3) were negative controls. Numbers indicate relative APOC3 protein level, wherein 1.00 represents 100% relative to PBS. In various in vivo studies, including this one, tested animals were transgenic mice expressing the human APOC3 gene.

TABLE 60H
Part I. Oligonucleotide accumulation in the liver

| PBS | WV-6558 | WV-9542 | WV-9543 | WV-9544 | WV-9545 | WV-9546 |
|---|---|---|---|---|---|---|
| 0 | 2.95 | 1.73 | 3.52 | 3.82 | 2.02 | 4.27 |
| 0 | 2.46 | 1.69 | 2.49 | 4.19 | 1.99 | 1.37 |
| 0 | 2.48 | 0.45 | 1.14 | 2.74 | 1.30 | 1.29 |
| 0 | 1.85 | 1.09 | 2.12 | 2.26 | 1.14 | 1.25 |
| 0 | 1.79 | 1.43 | 4.26 | 1.88 | 1.07 | 0.82 |

Oligonucleotide accumulation in the liver was also analyzed after a single 3 mg/kg dose, 30 min. Numbers indicate pg of oligonucleotide/g of tissue. Tested animals were transgenic mice expressing the human APOC3 gene.
In the same experiment: Oligonucleotide accumulation in the liver was also analyzed for WV-6558 and WV-9542 after a single 1 mg/kg dose, 30 min. Numbers indicate pg of oligonucleotide/g of tissue.

| | WV-6558 | WV-9542 |
|---|---|---|
| PBS | 1 mpk | 1 mpk |
| 0 | 1.92 | 0.46 |
| 0 | 1.77 | 1.08 |
| 0 | 1.43 | 0.56 |
| 0 | 0.68 | 0.30 |
| 0 | 0.18 | 0.67 |

TABLE 60H
Part II. Oligonucleotide accumulation in the liver

| PBS | WV-6558 | WV-9542 | WV-9543 | WV-9544 | WV-9545 | WV-9546 |
|---|---|---|---|---|---|---|
| 0 | 3.30 | 2.93 | 6.83 | 4.56 | 3.55 | 3.83 |
| 0 | 3.49 | 2.20 | 6.56 | 4.45 | 2.23 | 4.05 |
| 0 | 3.18 | 1.34 | 4.58 | 2.72 | 1.94 | 2.28 |
| 0 | 2.41 | 1.61 | 3.87 | 2.31 | 3.03 | 2.12 |
| 0 | 1.43 | 2.90 | 4.10 | 2.36 | 1.85 | 3.50 |

Oligonucleotide accumulation in the liver was also analyzed after a single 3 mg/kg dose, 8 days. Numbers indicate μg of oligonucleotide/g of tissue. Tested animals were transgenic mice expressing the human APOC3 gene.
In the same experiment: Oligonucleotide accumulation in the liver was also analyzed for WV-6558 and WV-9542 after a single 1 mg/kg (1 mpk) dose, 8 days. Numbers indicate ug of oligonucleotide/g of tissue.

| | WV-6558 | WV-9542 |
|---|---|---|
| PBS | 1 mpk | 1 mpk |
| 0 | 0.72 | 1.08 |
| 0 | 0.74 | 1.20 |
| 0 | 0.60 | 0.75 |
| 0 | 0.55 | 0.57 |
| 0 | 0.63 | 0.63 |

[1790] As shown in Table 601, animals were dosed subcutaneously with 10 mpk (mg/kg animal weight) of oligonucleotide on days 1 and 5, and samples were obtained for testing on days −2, 5, 8 and 28. Level of serum APOC3 is shown.

TABLE 60I
Activity of oligonucleotides

| | −2 | 5 | 8 | 14 | 21 | 28 |
|---|---|---|---|---|---|---|
| PBS | 0.85 | 0.77 | 0.77 | 0.87 | 0.70 | 0.59 |
| | 0.82 | 0.80 | 0.85 | 0.78 | 0.62 | 0.67 |
| | 1.21 | 1.23 | 1.22 | 1.22 | 1.32 | 1.33 |
| | 1.12 | 1.20 | 1.16 | 1.13 | 1.36 | 1.41 |
| WV-2722 | 0.89 | 0.71 | 0.53 | 0.70 | 0.86 | 0.95 |
| | 0.95 | 0.52 | 0.27 | 0.64 | 0.72 | 0.79 |
| | 1.12 | 0.89 | 0.44 | 0.84 | 1.03 | 1.36 |
| | 1.10 | 1.08 | 0.71 | 0.82 | 1.06 | 1.46 |
| WV-4204 | 0.78 | 0.75 | 0.42 | 0.61 | 0.70 | 0.68 |
| | 0.81 | 0.70 | 0.35 | 0.43 | 0.50 | 0.52 |
| | 1.13 | 1.10 | 0.73 | 0.71 | 0.63 | 1.21 |
| | 1.09 | 0.87 | 0.36 | 0.10 | 0.27 | 0.65 |
| WV-4205 | 0.94 | 0.78 | 0.73 | 0.28 | 0.86 | 0.90 |
| | 0.64 | 0.45 | 0.26 | 0.20 | 0.73 | 0.71 |
| | 1.07 | 0.74 | 0.35 | 0.16 | 0.74 | 0.96 |
| | 1.14 | 1.07 | 0.93 | 0.42 | 1.37 | 1.42 |
| WV-4206 | 1.10 | 1.10 | 1.08 | 0.57 | 1.22 | 1.21 |
| | 1.06 | 0.98 | 0.88 | 0.39 | 0.84 | 1.06 |
| | 0.72 | 0.63 | 0.43 | 0.19 | 0.56 | 0.45 |
| | 0.85 | 0.81 | 0.86 | 0.37 | 0.87 | 0.93 |
| WV-4207 | 0.79 | 0.92 | 0.76 | 0.31 | 0.71 | 0.68 |
| | 0.77 | 0.96 | 0.89 | 0.35 | 0.94 | 0.91 |
| | 1.01 | 1.01 | 0.99 | 0.78 | 1.17 | 1.40 |
| | 1.05 | 0.93 | 1.03 | 0.65 | 1.33 | 1.34 |
| WV-4208 | 0.87 | 0.96 | 0.78 | 0.83 | 0.80 | 0.61 |
| | 0.82 | 0.71 | 0.45 | 0.31 | 0.41 | 0.52 |
| | 1.08 | 0.89 | 0.64 | 0.64 | 0.70 | |
| | 1.07 | 1.05 | 0.85 | 0.92 | 1.08 | 1.17 |
| WV-4209 | 1.07 | 0.91 | 0.92 | 0.96 | 1.13 | 1.18 |
| | 1.00 | 0.71 | 0.82 | 0.86 | 1.02 | 1.11 |
| | 1.05 | 1.12 | 0.94 | 1.03 | 1.18 | 1.28 |
| | 1.01 | 1.08 | 0.94 | 0.99 | 1.28 | 1.42 |
| WV-4210 | 0.95 | 0.73 | 0.74 | 0.72 | 0.88 | 0.80 |
| | 0.88 | 0.71 | 0.54 | 0.50 | 0.67 | 0.66 |
| | 1.00 | 0.99 | 0.95 | 0.98 | 1.06 | 1.13 |
| | 1.13 | 1.10 | 0.95 | 1.01 | 0.96 | 1.32 |
| WV-4211 | 1.01 | 0.81 | 0.43 | 0.15 | | |
| | 0.70 | 0.78 | 0.46 | 0.17 | 0.63 | 0.55 |
| | 1.08 | 1.06 | 0.89 | 0.33 | 1.10 | 1.23 |
| | 1.02 | 1.11 | 0.89 | 0.41 | 0.94 | 1.31 |
| WV-4212 | 1.01 | 0.95 | 0.93 | 0.39 | | |
| | 0.95 | 0.90 | 0.84 | 0.36 | 0.94 | 0.95 |
| | 0.91 | 0.97 | 0.88 | 0.35 | 1.01 | 0.96 |
| | 1.07 | 1.06 | 0.92 | 0.41 | 0.87 | 0.96 |
| WV-4213 | 1.00 | 1.00 | 0.91 | 0.49 | 1.11 | 1.14 |
| | 0.82 | 0.77 | 0.68 | 0.26 | 0.74 | 0.67 |
| | 1.11 | 1.03 | 1.00 | 0.48 | 1.03 | 0.92 |
| | 1.07 | 1.11 | 1.03 | 0.56 | 1.36 | 1.40 |
| WV-4214 | 0.36 | 0.23 | 0.19 | 0.22 | 0.82 | 0.82 |
| | 0.27 | 0.17 | 0.14 | 0.20 | 0.52 | 0.58 |
| | 0.71 | 0.52 | 0.39 | 0.52 | 1.41 | 1.33 |
| | 0.71 | 0.32 | 0.07 | 0.14 | 0.93 | 1.17 |
| WV-4215 | 0.58 | 0.45 | 0.47 | 0.62 | 1.38 | 1.21 |
| | 0.39 | 0.39 | 0.34 | 0.55 | 1.31 | 1.36 |
| | 0.29 | 0.12 | 0.11 | 0.15 | 0.51 | 0.54 |
| | 0.22 | 0.19 | 0.11 | 0.16 | 0.57 | 0.70 |
| WV-4216 | 0.33 | 0.11 | 0.09 | 0.23 | 0.81 | 0.71 |
| | 0.38 | 0.12 | 0.10 | 0.17 | 0.67 | 1.18 |
| | 0.68 | 0.45 | 0.34 | 0.42 | 1.41 | 1.41 |
| | 0.56 | 0.25 | 0.12 | 0.24 | 1.17 | 1.27 |

[1791] As shown in Table 60J, animals were dosed subcutaneously with 10 mpk (mg/kg animal weight) of oligonucleotide on days 1 and 5, and samples were obtained for testing on days −2, 1, 5, 8, 14, 21, and 28. Level of APOC3 protein and TG (triglycerides) is shown.

TABLE 60J
Activity of oligonucleotides

| | Day | −2 | 5 | 8 | 14 |
|---|---|---|---|---|---|
| PBS | ApoC3 | 0.89 | 0.74 | 0.71 | 0.63 |
| | | 0.75 | 0.72 | 0.47 | 0.60 |
| | | 1.26 | 1.20 | 1.07 | 1.38 |
| | | 1.57 | 0.93 | 1.08 | 1.17 |
| | TG | 0.61 | 0.58 | 0.56 | 0.48 |
| | | 0.62 | 0.76 | 0.51 | 0.52 |
| | | 0.99 | 1.44 | 1.42 | 1.88 |
| | | 1.50 | 1.09 | 1.38 | 1.66 |
| WV-3534 | ApoC3 | 0.83 | 0.09 | 0.10 | 0.10 |
| | | 1.14 | 0.17 | 0.12 | 0.09 |
| | | 1.17 | 0.22 | 0.51 | 0.13 |
| | | 1.15 | 0.17 | 0.36 | 0.21 |
| | TG | 0.91 | 0.13 | 0.17 | 0.13 |
| | | 1.34 | 0.24 | 0.18 | 0.14 |
| | | 0.82 | 0.25 | 0.61 | 0.16 |
| | | 0.93 | 0.18 | 0.44 | 0.23 |
| WV-2816 | ApoC3 | 1.10 | 0.35 | 0.21 | 0.31 |
| | | 1.09 | 0.53 | 0.35 | 0.52 |
| | | 0.92 | 0.65 | 0.33 | 0.27 |
| | | 0.79 | 0.96 | 0.67 | 0.61 |
| | TG | 1.04 | 0.44 | 0.26 | 0.35 |
| | | 1.01 | 0.54 | 0.37 | 0.47 |
| | | 0.63 | 1.15 | 0.50 | 0.40 |
| | | 0.70 | 1.43 | 0.96 | 0.69 |
| WV-4125 | ApoC3 | 0.47 | 0.32 | 0.27 | 0.32 |
| | | 0.86 | 0.23 | 0.17 | 0.36 |
| | | 1.22 | 0.99 | 0.82 | 0.96 |
| | | 1.33 | 0.88 | 0.98 | 0.94 |
| | TG | 0.54 | 0.36 | 0.40 | 0.36 |
| | | 1.05 | 0.24 | 0.23 | 0.31 |
| | | 1.01 | 1.51 | 1.31 | 1.30 |
| | | 0.88 | 0.78 | 1.03 | 0.92 |
| WV-4127 | ApoC3 | 1.06 | 1.00 | 0.51 | 0.75 |
| | | 0.46 | 0.26 | 0.18 | 0.41 |
| | | 1.42 | 0.94 | 0.82 | 1.07 |
| | | 1.23 | 1.11 | 1.25 | 0.72 |
| | TG | 1.29 | 1.74 | 0.61 | 0.85 |
| | | 0.59 | 0.20 | 0.23 | 0.46 |
| | | 1.37 | 1.03 | 1.47 | 1.06 |
| | | 1.37 | 1.34 | 1.31 | 1.04 |
| WV-4128 | ApoC3 | 0.84 | 0.40 | 0.35 | 0.63 |
| | | 0.62 | 0.38 | 0.38 | 0.32 |
| | | 1.54 | 1.25 | 1.04 | 1.47 |
| | | 1.03 | 1.45 | 1.39 | 1.46 |
| | TG | 0.90 | 0.43 | 0.45 | 0.59 |
| | | 0.50 | 0.32 | 0.30 | 0.25 |
| | | 1.69 | 1.69 | 1.60 | 1.51 |
| | | 0.90 | 1.30 | 1.35 | 1.37 |
| WV-4129 | ApoC3 | 0.92 | 0.73 | 0.35 | 0.30 |
| | | 1.02 | 0.36 | 0.28 | 0.52 |
| | | 1.23 | 1.01 | 0.56 | 0.37 |
| | | 1.60 | 1.04 | 0.25 | 0.16 |
| | TG | 0.82 | 0.82 | 0.40 | 0.30 |
| | | 1.07 | 0.41 | 0.29 | 0.55 |
| | | 1.51 | 1.38 | 1.15 | 0.48 |
| | | 1.74 | 1.56 | 0.51 | 0.25 |
| WV-4132 | ApoC3 | 0.75 | 0.33 | 0.32 | 0.27 |
| | | 0.90 | 0.46 | 0.37 | 0.41 |
| | | 1.33 | 1.04 | 0.80 | 0.85 |
| | | 1.05 | 0.79 | 0.44 | 0.53 |
| | TG | 0.89 | 0.33 | 0.38 | 0.28 |
| | | 1.01 | 0.65 | 0.43 | 0.51 |
| | | 1.36 | 1.29 | 1.14 | 1.14 |
| | | 1.39 | 0.94 | 0.70 | 0.53 |
| WV-4133 | ApoC3 | 0.88 | 0.44 | 0.41 | 0.66 |
| | | 0.42 | 0.22 | 0.16 | 0.32 |
| | | 1.16 | 0.63 | 0.41 | 0.25 |
| | | 0.98 | 1.04 | 0.61 | 0.50 |
| | TG | 1.03 | 0.52 | 0.53 | 0.66 |
| | | 0.46 | 0.22 | 0.25 | 0.40 |
| | | 1.30 | 0.93 | 0.61 | 0.23 |
| | | 0.90 | 1.38 | 0.90 | 0.59 |
| WV-4134 | ApoC3 | 0.48 | 0.27 | 0.24 | 0.31 |
| | | 0.43 | 0.22 | 0.18 | 0.27 |
| | | 1.10 | 0.97 | 0.67 | 0.82 |
| | | 1.82 | 1.12 | 0.57 | 0.69 |
| | TG | 0.54 | 0.29 | 0.23 | 0.26 |
| | | 0.48 | 0.24 | 0.23 | 0.30 |
| | | 1.46 | 1.57 | 1.17 | 1.19 |
| | | 1.30 | 0.90 | 0.70 | 0.22 |

| | | −2 | 5 | 8 | 14 |
|---|---|---|---|---|---|
| PBS | ApoC3 | 0.622 | 0.747 | 0.784 | 0.661 |
| | | 0.407 | 0.439 | 0.464 | 0.532 |
| | | 2.096 | 1.034 | 1.411 | 1.373 |
| | | 1.852 | 0.96 | 1.111 | 1.506 |
| | TG | 0.631758 | 0.60746 | 0.546714 | 0.473818 |
| | | 0.461669 | 0.473818 | 0.413073 | 0.461669 |
| | | 1.627992 | 1.34856 | 1.688738 | 1.433605 |
| | | 2.10181 | 0.971935 | 1.457903 | 1.299964 |
| WV-3534 | ApoC3 | 0.581 | 0.096 | 0.129 | 0.116 |
| | | 0.709 | 0.167 | 0.117 | 0.146 |
| | | 2.935 | 0.993 | 0.518 | 0.148 |
| | | 1.537 | 0.799 | 0.319 | 0.194 |
| | TG | 0.741101 | 0.085044 | 0.14579 | 0.085044 |
| | | 0.959786 | 0.218685 | 0.14579 | 0.109343 |
| | | 1.385008 | 1.117726 | 0.619609 | 0.109343 |
| | | 1.166322 | 0.984085 | 0.388774 | 0.182238 |
| WV-2816 | ApoC3 | 0.869 | 0.365 | 0.246 | 0.278 |
| | | 0.737 | 0.411 | 0.298 | 0.441 |
| | | 1.953 | 0.828 | 0.353 | 0.369 |
| | | 1.354 | 1.361 | 0.739 | 0.734 |
| | TG | 0.75325 | 0.400923 | 0.242984 | 0.255133 |
| | | 0.959786 | 0.437371 | 0.315879 | 0.388774 |
| | | 1.142024 | 1.069129 | 0.425222 | 0.291581 |
| | | 0.984085 | 1.336411 | 0.850443 | 0.571012 |
| WV-4126 | ApoC3 | 1.681 | 0.681 | 0.348 | 0.48 |
| | | 1.343 | 0.435 | 0.17 | 0.249 |
| | | 0.807 | 0.489 | 0.195 | 0.421 |
| | | 1.148 | 0.749 | 0.523 | 0.477 |
| | TG | 1.34856 | 0.862593 | 0.59531 | 0.388774 |
| | | 1.312113 | 0.425222 | 0.218685 | 0.182238 |
| | | 1.044831 | 0.510266 | 0.242984 | 0.400923 |
| | | 1.737334 | 0.59531 | 1.154173 | 0.388774 |
| WV-4130 | ApoC3 | 1.128 | 0.852 | 0.782 | 1.798 |
| | | 0.424 | 0.753 | 0.301 | 0.445 |
| | | 2.74 | 0.6 | 0.084 | 0.281 |
| | | 0.192 | 0.084 | 0.12 | 0.165 |
| | TG | 0.631758 | 0.328028 | 0.315879 | 0.242984 |
| | | 0.583161 | 0.218685 | 0.157939 | 0.085044 |
| | | 1.154173 | 0.279431 | 0.218685 | 0.352327 |
| | | 1.190621 | 0.291581 | 0.170089 | 0.194387 |
| WV-4131 | ApoC3 | 0.311 | 0.223 | 0.175 | 0.344 |
| | | 0.128 | 0.09 | 0.05 | 0.139 |
| | | 1.13 | 2.182 | 0.271 | 0.09 |
| | | 1.334 | 1.01 | 0.631 | 0.458 |
| | TG | 0.388774 | 0.157939 | 0.230835 | 0.218685 |
| | | 0.206536 | 0.14579 | 0.097194 | 0.109343 |
| | | 1.105576 | 1.008383 | 0.315879 | 0.230835 |
| | | 0.668206 | 0.376625 | 0.072895 | 0.109343 |
| WV-4135 | ApoC3 | 2.181 | 1.22 | 0.526 | 0.575 |
| | | 1.996 | 1.102 | 0.691 | 0.812 |
| | | 1.418 | 0.379 | 0.187 | 0.271 |
| | | 2.081 | 0.594 | 0.213 | 0.088 |
| | TG | 0.692504 | 0.255133 | 0.182238 | 0.267282 |
| | | 0.75325 | 0.352327 | 0.206536 | 0.255133 |
| | | 1.117726 | 0.60746 | 0.352327 | 0.255133 |
| | | 0.935488 | 0.704653 | 0.30373 | 0.255133 |
| WV-4136 | ApoC3 | 1.013 | 0.132 | 0.067 | 0.049 |
| | | 0.663 | 0.211 | 0.171 | 0.271 |
| | | 0.527 | 1.451 | 0.817 | 0.232 |
| | | 1.748 | 1.263 | 0.511 | 0.453 |
| | TG | 0.911189 | 0.267282 | 0.121492 | 0.109343 |
| | | 0.182238* | 0.072895* | 0.072895* | 0.060746* |
| | | 0.947637 | 0.546714 | 0.388774 | 0.109343 |
| | | 0.534564 | 0.364476 | 0.206536 | 0.085044 |

### Relative to PBS.

TABLE 60K
Activity of oligonucleotides

| | −2 | 4 | 7 | 14 | 21 | 28 | 39 |
|---|---|---|---|---|---|---|---|
| WV-2141 | 1.49 | 0.67 | 0.37 | 0.56 | 0.80 | 0.79 | 0.75 |
| | 0.64 | 0.32 | 0.17 | 0.32 | | 0.55 | 0.91 |
| | 1.21 | 0.76 | 0.60 | 0.87 | 1.11 | 1.13 | 1.24 |
| | 0.88 | 0.81 | 0.57 | 0.33 | 0.99 | 0.85 | 0.83 |
| WV-3968 | 0.80 | 0.13 | 0.11 | 0.16 | 0.33 | 0.36 | |
| | 0.77 | 0.09 | 0.08 | 0.11 | 0.27 | 0.37 | 0.73 |
| | 2.00 | 0.32 | 0.13 | 0.11 | | 0.26 | 0.79 |
| | 0.81 | 0.06 | 0.03 | 0.07 | 0.17 | 0.29 | 0.43 |
| WV-3534 | 1.11 | 0.15 | 0.11 | 0.13 | 0.43 | 0.58 | 0.74 |
| | 1.08 | 0.14 | 0.11 | 0.11 | 0.38 | 0.45 | 0.66 |
| | 1.61 | 0.41 | 0.21 | 0.18 | 0.43 | 0.67 | 1.14 |
| | 0.00 | 0.25 | 0.18 | 0.15 | 0.48 | 0.78 | 1.11 |
| | 1.00 | 0.65 | 0.08 | 0.09 | 0.32 | 0.52 | 1.01 |

Animals were dosed twice, subcutaneously, on days 1 and 4 at 10 mpk. Tested samples were withdrawn on days 2, 4, 7, 14, 21, 28 and 39.

TABLE 60L

| Conc. | 1 | 0.522 | 0.045 | −0.43 | −0.90 | −1.38 | −1.86 | −2.33 | −2.81 | −3.29 | −3.77 |
|---|---|---|---|---|---|---|---|---|---|---|---|
| WV-7540 | 0.133 | 0.158 | 0.269 | 0.395 | 0.559 | 0.688 | 0.726 | 0.693 | 0.720 | 0.774 | 0.637 |
| | 0.153 | 0.251 | 0.325 | 0.470 | 0.644 | 0.798 | 0.921 | 0.839 | 0.923 | 1.343 | 1.046 |
| WV-8427 | 0.202 | 0.225 | 0.372 | 0.400 | 0.634 | 0.802 | 0.913 | 1.000 | 1.004 | 0.910 | 0.880 |
| | 0.168 | 0.258 | 0.354 | 0.543 | 0.714 | 0.923 | 0.972 | 0.982 | 1.038 | 1.596 | 1.252 |
| WV-8429 | 0.140 | 0.150 | 0.255 | 0.276 | 0.455 | 0.609 | 0.788 | 1.011 | 0.948 | 0.968 | 1.307 |
| | 0.148 | 0.187 | 0.218 | 0.297 | 0.491 | 0.708 | 0.964 | 0.948 | 1.006 | 0.954 | 0.959 |
| WV-8431 | 0.167 | 0.205 | 0.234 | 0.288 | 0.494 | 0.755 | 0.896 | 1.000 | 1.055 | 1.117 | 0.953 |
| | 0.209 | 0.234 | 0.275 | 0.338 | 0.504 | 0.713 | 0.913 | 1.078 | 0.972 | 1.023 | 0.914 |
| WV-6439 | 0.206 | 0.172 | 0.217 | 0.232 | 0.521 | 0.740 | 0.909 | 0.993 | 1.052 | 0.948 | 0.952 |
| | 0.198 | 0.301 | 0.239 | 0.552 | 0.567 | 0.747 | 1.010 | 1.254 | 1.038 | 1.334 | 1.212 |
| WV-6439 | 0.190 | 0.176 | 0.189 | 0.265 | 0.400 | 0.566 | 0.703 | 0.797 | 0.940 | 0.985 | 0.864 |
| | 0.209 | 0.217 | 0.226 | 0.226 | 0.398 | 0.635 | 0.915 | 1.040 | 1.025 | 1.142 | 1.019 |
| WV-6431 | 0.209 | 0.283 | 0.185 | 0.227 | 0.415 | 0.668 | 0.728 | 0.850 | 1.053 | 0.899 | 0.927 |
| | 0.220 | 0.191 | 0.202 | 0.206 | 0.388 | 0.622 | 0.807 | 0.944 | 0.891 | 0.950 | 1.032 |
| WV-6439 | 0.198 | 0.208 | 0.229 | 0.285 | 0.542 | 0.670 | 0.749 | 0.852 | 0.775 | 0.855 | 0.863 |
| Plate Control | 0.206 | 0.183 | 0.232 | 0.454 | 0.520 | 0.736 | 0.935 | 0.986 | 0.998 | 1.099 | 0.890 |

Concentrations (Conc.) are provided in nM, exp 10.

TABLE 60M
Activity of oligonucleotides

| | PBS | WV-6544 | WV-6558 | WV-6559 |
|---|---|---|---|---|
| 1 mpk | 1.269 | 1.314 | 0.252 | 0.387 |
| | 1.144 | 0.529 | 0.085 | 0.302 |
| | 0.865 | 0.554 | 0.077 | 0.219 |
| | 0.914 | 0.374 | 0.108 | 0.299 |
| | 0.808 | 0.416 | 0.206 | 0.402 |
| 3 mpk | | 0.199 | 0.106 | 0.194 |
| | | 0.25 | 0.189 | 0.257 |
| | | 0.182 | 0.091 | 0.388 |
| | | 0.102 | 0.064 | 0.232 |
| | | 0.146 | 0.044 | 0.065 |
| 10 mpk | | 0.066 | 0.058 | 0.088 |
| | | 0.091 | 0.058 | 0.065 |
| | | 0.067 | 0.061 | 0.067 |
| | | 0.151 | 0.094 | 0.075 |
| | | 0.099 | 0.103 | 0.09 |

Single IV dosage. Numbers are APOC3 mRNA level at 15 days. APOC3 levels were also reduced at 8 days (data not shown).

TABLE 60N

| | 1 | 8 | 15 | 22 | 29 | 36 | 43 | 50 | 57 | 63 |
|---|---|---|---|---|---|---|---|---|---|---|
| PBS | 0.53 | 0.27 | 0.88 | 0.89 | 1.55 | 1.66 | 0.68 | 1.21 | 0.87 | 1.29 |
| | 1.23 | 1.49 | 1.42 | 1.19 | 1.13 | 1.19 | 1.12 | 0.96 | 1.31 | 1.09 |
| | 0.65 | 0.83 | 1.06 | 0.86 | 0.88 | 0.59 | 0.67 | 1.46 | 1.19 | 0.73 |
| | 1.26 | 0.98 | 1.15 | 1.94 | 1.21 | 1.23 | 1.99 | 0.82 | 1.26 | 1.36 |
| | 1.34 | 1.42 | 0.50 | 0.12 | 0.24 | 0.33 | 0.54 | 0.54 | 0.38 | 0.53 |
| WV-3968 | 2.60 | 0.13 | 0.04 | 0.06 | 0.43 | 0.47 | 1.76 | 1.29 | 1.51 | 1.37 |
| | 2.18 | 0.12 | 0.10 | 0.52 | 0.68 | 1.46 | 1.88 | 0.71 | 1.51 | 1.78 |
| | 1.67 | 0.01 | 0.05 | 0.07 | 0.29 | 0.57 | 1.83 | 0.91 | 0.68 | 1.43 |
| | 1.14 | 0.01 | 0.03 | 0.03 | 0.26 | 0.56 | 1.05 | 1.23 | 0.88 | 0.70 |
| | 1.11 | 0.02 | 0.02 | 0.03 | 0.19 | 0.55 | 0.81 | 1.27 | 1.56 | 1.30 |
| WV-6003 | 1.60 | 0.04 | 0.06 | 0.12 | 0.12 | 0.31 | 0.45 | 0.54 | 0.94 | 1.52 |
| | 0.40 | 0.04 | 0.06 | 0.08 | 0.14 | 0.16 | 0.45 | 0.23 | 0.68 | 1.04 |
| | 1.30 | 0.03 | 0.05 | 0.08 | 0.25 | 0.12 | 0.33 | 0.24 | 0.44 | 0.58 |
| | 1.33 | 0.04 | 0.05 | 0.13 | 0.34 | 0.09 | 0.43 | 0.34 | 0.73 | 1.56 |
| | 1.11 | 0.04 | 0.06 | 0.00 | 0.15 | 0.09 | 0.31 | 0.19 | 0.70 | 0.87 |
| WV-6555 | 0.95 | 0.07 | 0.05 | 0.24 | 0.57 | 0.37 | 1.05 | 0.46 | 0.54 | 1.07 |
| | 0.14 | 0.03 | 0.04 | 0.04 | 0.17 | 0.09 | 0.35 | 0.39 | 0.27 | 0.42 |
| | 1.70 | 0.09 | 0.06 | 0.11 | 0.25 | 0.87 | 0.84 | 1.69 | 1.07 | 2.46 |
| | 0.29 | 0.02 | 0.04 | 0.08 | 0.27 | 0.34 | 0.61 | 0.47 | 0.29 | 0.97 |
| | 0.75 | 0.05 | 0.09 | 0.19 | 0.67 | 0.77 | 0.94 | 0.79 | 0.85 | 1.18 |
| WV-6757 | 1.08 | 0.04 | 0.06 | 0.10 | 0.43 | 0.24 | 0.39 | 0.27 | 0.22 | 0.42 |
| | 0.72 | 0.04 | 0.04 | 0.07 | 0.18 | 0.13 | 0.44 | 0.26 | 0.29 | 0.35 |
| | 0.79 | 0.02 | 0.00 | 0.37 | 0.12 | 0.13 | 0.32 | 0.34 | 0.37 | 0.81 |
| | 2.78 | 0.25 | 0.20 | 0.36 | 0.49 | 1.05 | 1.13 | 0.87 | 0.48 | 1.67 |
| | 0.81 | 0.08 | 0.06 | 0.07 | 0.44 | 0.42 | 0.96 | 0.53 | 0.68 | 1.01 |
| WV-6544 | 0.88 | 0.04 | 0.03 | 0.02 | 0.05 | 0.51 | 0.96 | 1.28 | 1.88 | 1.90 |
| | 0.55 | 0.02 | 0.05 | 0.04 | 0.17 | 0.32 | 1.50 | 1.15 | 1.19 | 2.47 |
| | 0.71 | 0.02 | 0.03 | 0.04 | 0.08 | 0.82 | 0.82 | 1.46 | 1.54 | 1.49 |
| | 0.78 | 0.03 | 0.00 | 0.01 | 0.14 | 0.18 | 0.60 | 0.33 | 0.24 | 0.49 |
| | 1.38 | 0.13 | 0.03 | 0.02 | 0.35 | 0.37 | 1.05 | 0.75 | 0.92 | 1.64 |
| WV-6558 | 0.94 | 0.01 | 0.01 | 0.01 | 0.02 | 0.05 | 0.22 | 0.06 | 0.16 | 0.56 |
| | 1.00 | 0.01 | 0.05 | 0.04 | 0.27 | 0.19 | 0.58 | 0.69 | 0.75 | 1.29 |
| | 0.59 | 0.03 | 0.03 | 0.02 | 0.04 | 0.04 | 0.23 | 0.11 | 0.13 | 0.16 |
| | 1.39 | 0.02 | 0.03 | 0.02 | 0.04 | 0.14 | 0.27 | 0.25 | 0.46 | 1.15 |
| | 0.93 | 0.05 | 0.05 | 1.50 | 0.05 | 0.05 | 0.28 | 0.29 | 0.49 | 1.22 |
| WV-6559 | 0.70 | 0.02 | 0.04 | 0.06 | 0.05 | 0.08 | 0.25 | 0.28 | 0.51 | 1.33 |
| | 1.64 | 0.06 | 0.01 | 0.05 | 0.08 | 0.05 | 0.22 | 0.29 | 0.12 | 0.50 |
| | 1.06 | 0.01 | 0.00 | 0.04 | 0.03 | 0.04 | 0.24 | 0.00 | 0.02 | 0.01 |
| | 1.53 | 0.21 | 0.02 | 0.05 | 0.13 | 0.17 | 0.32 | 0.71 | 0.69 | 1.92 |
| | 0.60 | 0.01 | 0.03 | 0.02 | 0.05 | 0.07 | 0.30 | 0.36 | 0.18 | 0.40 |

hAPOC3 Tg (transgenic) mice were dosed with 5 mpk of oligonucleotide on days 1 and 3, and samples were collected on days 1, 8, 15, 22, 29, 43, 50, 57 and 63. Levels of hAPOC3 protein level relative to PBS are shown.

TABLE 60O

| | 1 | 8 | 15 | 22 | 29 | 36 | 43 | 50 | 57 | 63 |
|---|---|---|---|---|---|---|---|---|---|---|
| PBS | 0.53 | 0.27 | 0.88 | 0.89 | 1.55 | 1.66 | 0.68 | 1.21 | 0.87 | 1.29 |
| | 1.23 | 1.49 | 1.42 | 1.19 | 1.13 | 1.19 | 1.12 | 0.96 | 1.31 | 1.09 |
| | 0.65 | 0.83 | 1.06 | 0.86 | 0.88 | 0.59 | 0.67 | 1.46 | 1.19 | 0.73 |
| | 1.26 | 0.98 | 1.15 | 1.94 | 1.21 | 1.23 | 1.99 | 0.82 | 1.26 | 1.36 |
| | 1.34 | 1.42 | 0.50 | 0.12 | 0.24 | 0.33 | 0.54 | 0.54 | 0.38 | 0.53 |
| WV-3968 | 2.60 | 0.13 | 0.04 | 0.06 | 0.43 | 0.47 | 1.76 | 1.29 | 1.51 | 1.37 |
| | 2.18 | 0.12 | 0.10 | 0.52 | 0.68 | 1.46 | 1.88 | 0.71 | 1.51 | 1.78 |
| | 1.67 | 0.01 | 0.05 | 0.07 | 0.29 | 0.57 | 1.83 | 0.91 | 0.68 | 1.43 |
| | 1.14 | 0.01 | 0.03 | 0.03 | 0.26 | 0.56 | 1.05 | 1.23 | 0.88 | 0.70 |
| | 1.11 | 0.02 | 0.02 | 0.03 | 0.19 | 0.55 | 0.81 | 1.27 | 1.56 | 1.30 |
| WV-6003 | 1.60 | 0.04 | 0.06 | 0.12 | 0.12 | 0.31 | 0.45 | 0.54 | 0.94 | 1.52 |
| | 0.40 | 0.04 | 0.06 | 0.08 | 0.14 | 0.16 | 0.45 | 0.23 | 0.68 | 1.04 |
| | 1.30 | 0.03 | 0.05 | 0.08 | 0.25 | 0.12 | 0.33 | 0.24 | 0.44 | 0.58 |
| | 1.33 | 0.04 | 0.05 | 0.13 | 0.34 | 0.09 | 0.43 | 0.34 | 0.73 | 1.56 |
| | 1.11 | 0.04 | 0.06 | 0.00 | 0.15 | 0.09 | 0.31 | 0.19 | 0.70 | 0.87 |
| WV-6555 | 0.95 | 0.07 | 0.05 | 0.24 | 0.57 | 0.37 | 1.05 | 0.46 | 0.54 | 1.07 |
| | 0.14 | 0.03 | 0.04 | 0.04 | 0.17 | 0.09 | 0.35 | 0.39 | 0.27 | 0.42 |
| | 1.70 | 0.09 | 0.06 | 0.11 | 0.25 | 0.87 | 0.84 | 1.69 | 1.07 | 2.46 |
| | 0.29 | 0.02 | 0.04 | 0.08 | 0.27 | 0.34 | 0.61 | 0.47 | 0.29 | 0.97 |
| | 0.75 | 0.05 | 0.09 | 0.19 | 0.67 | 0.77 | 0.94 | 0.79 | 0.85 | 1.18 |
| WV-6757 | 1.08 | 0.04 | 0.06 | 0.10 | 0.43 | 0.24 | 0.39 | 0.27 | 0.22 | 0.42 |
| | 0.72 | 0.04 | 0.04 | 0.07 | 0.18 | 0.13 | 0.44 | 0.26 | 0.29 | 0.35 |
| | 0.79 | 0.02 | 0.00 | 0.37 | 0.12 | 0.13 | 0.32 | 0.34 | 0.37 | 0.81 |
| | 2.78 | 0.25 | 0.20 | 0.36 | 0.49 | 1.05 | 1.13 | 0.87 | 0.48 | 1.67 |
| | 0.81 | 0.08 | 0.06 | 0.07 | 0.44 | 0.42 | 0.96 | 0.53 | 0.68 | 1.01 |
| WV-6544 | 0.88 | 0.04 | 0.03 | 0.02 | 0.05 | 0.51 | 0.96 | 1.28 | 1.88 | 1.90 |
| | 0.55 | 0.02 | 0.05 | 0.04 | 0.17 | 0.32 | 1.50 | 1.15 | 1.19 | 2.47 |
| | 0.71 | 0.02 | 0.03 | 0.04 | 0.08 | 0.82 | 0.82 | 1.46 | 1.54 | 1.49 |
| | 0.78 | 0.03 | 0.00 | 0.01 | 0.14 | 0.18 | 0.60 | 0.33 | 0.24 | 0.49 |
| | 1.38 | 0.13 | 0.03 | 0.02 | 0.35 | 0.37 | 1.05 | 0.75 | 0.92 | 1.64 |
| WV-6558 | 0.94 | 0.01 | 0.01 | 0.01 | 0.02 | 0.05 | 0.22 | 0.06 | 0.16 | 0.56 |
| | 1.00 | 0.01 | 0.05 | 0.04 | 0.27 | 0.19 | 0.58 | 0.69 | 0.75 | 1.29 |
| | 0.59 | 0.03 | 0.03 | 0.02 | 0.04 | 0.04 | 0.23 | 0.11 | 0.13 | 0.16 |
| | 1.39 | 0.02 | 0.03 | 0.02 | 0.04 | 0.14 | 0.27 | 0.25 | 0.46 | 1.15 |
| | 0.93 | 0.05 | 0.05 | 1.50 | 0.05 | 0.05 | 0.28 | 0.29 | 0.49 | 1.22 |
| WV-6559 | 0.70 | 0.02 | 0.04 | 0.06 | 0.05 | 0.08 | 0.25 | 0.28 | 0.51 | 1.33 |
| | 1.64 | 0.06 | 0.01 | 0.05 | 0.08 | 0.05 | 0.22 | 0.29 | 0.12 | 0.50 |
| | 1.06 | 0.01 | 0.00 | 0.04 | 0.03 | 0.04 | 0.24 | 0.00 | 0.02 | 0.01 |
| | 1.53 | 0.21 | 0.02 | 0.05 | 0.13 | 0.17 | 0.32 | 0.71 | 0.69 | 1.92 |
| | 0.60 | 0.01 | 0.03 | 0.02 | 0.05 | 0.07 | 0.30 | 0.36 | 0.18 | 0.40 |

hAPOC3 Tg (transgenic) mice were dosed with 5 mpk of oligonucleotide on days 1 and 3, and samples were collected on days 1, 8, 15, 22, 29, 43, 50, 57 and 63. Levels of hAPOC3 protein level relative to PBS are shown.

TABLE 60P
Part I. Oligonucleotides

| | | | | SEQ |
|---|---|---|---|---|
| Oligo- | | | Stereo- | ID |
| nucleotide | Sequence | Naked Sequence | chemistry | NO: |
| WV-7297 | Mod038L001Teo * Geo * Geo * Teo * Aeo | TGGTAA TCCACTT | OXXXXXXXXXX | 1953 |
| | * A * T * m5C * m5C * A * m5C * T * T * T | TCAGAGG | XXXXXXXXX | |
| | * m5C * Aeo * Geo * Aeo * Geo * Geo | | | |
| WV-7298 | Mod039L001Teo * Geo * Geo * Teo * Aeo | TGGTAA TCCACTT | OXXXXXXXXXX | 1954 |
| | * A * T * m5C * m5C * A * m5C * T * T * T | TCAGAGG | XXXXXXXXX | |
| | * m5C * Aeo * Geo * Aeo * Geo * Geo | | | |
| WV-7299 | Mod040L001Teo * Geo * Geo * Teo * Aeo | TGGTAA TCCACTT | OXXXXXXXXXX | 1955 |
| | * A * T * m5C * m5C * A * m5C * T * T * T | TCAGAGG | XXXXXXXXX | |
| | * m5C * Aeo * Geo * Aeo * Geo * Geo | | | |
| WV-7300 | Mod041L001Teo * Geo * Geo * Teo * Aeo | TGGTAA TCCACTT | OXXXXXXXXXX | 1956 |
| | * A * T * m5C * m5C * A * m5C * T * T * T | TCAGAGG | XXXXXXXXX | |
| | * m5C * Aeo * Geo * Aeo * Geo * Geo | | | |
| WV-5287 | Mod034L001Teo * Geo * Geo * Teo * Aeo | TGGTAA TCCACTT | OXXXXXXXXXX | 1957 |
| | * A * T * m5C * m5C * A * m5C * T * T * T | TCAGAGG | XXXXXXXXX | |
| | * m5C * Aeo * Geo * Aeo * Geo * Geo | | | |

Several oligonucleotides were also prepared which target a mouse homolog of different gene, Factor XI (FXI), and which comprised an additional component, which was a tri-, bi- or mono-antennary ligand which was either a GalNAc or a PFE ligand.
The various components (e.g., *, Mod038, etc.) in this table are the same as those in Table 1A. All of these oligonucleotides are single-stranded, though the sequences are split into multiple lines for formatting.

TABLE 60P
Part II. Activity of oligonucleotides.

| mFXI Oligonucleotide | Ligand | mFX1/mHPRT1 |
|---|---|---|
| WV-3969 | Tri-GalNAc | 23 |
| WV-5287 | Tri-PFE ligand | 22 |
| WV-7299 | Bis-GalNAc | 22 |
| WV-7300 | Bis-PFE ligand | 20 |
| WV-7297 | Mono-GalNAc | 74 |
| WV-7298 | Mono-PFE ligand | 43 |

The oligonucleotides listed in Table 60P, Part I, were administered to mice at 0.3, 1 or 3 mpK QDx3. Numbers below represent the mFXI/mHPRT1 mRNA level relative to control at 3 mpk. Mice were also administered oligonucleotides at 0.3 and 1 mpk (data not shown).

[1793] While not wishing to be bound by any particular theory, the present disclosure notes that further experiments also provided additional data supporting the conclusions that various putative single-stranded RNAi agents were, in fact, capable of mediating RNA interference; and that various oligonucleotides designed to be capable of mediating knockdown via a RNaseH-mediated mechanism in fact mediated knockdown via a RNaseH-mediated mechanism.

[1794] In one experiment, an in vitro RNase H assay was performed, with APOC3 oligonucleotide WV-1868 (ASO, mediating a RNase H knockdown mechanism of APOC3) as a positive control, and APOC3 oligonucleotide WV-2110 (a single-stranded RNAi agent) as a negative control. RNA molecule WV-2372 is used as a test substrate. In the RNase H assay, dual mechanism APOC3 oligonucleotide WV-2111 mediated RNase H knockdown (data not shown).

[1795] In another experiment, an in vitro Ago-2 assay (for single-stranded RNA interference) was performed. This assay was performed with single-stranded RNAi agents to APOC3.

[1796] A RNA test substrate was WV-2372 (APOC3). In the results, the band representing the RNA test substrate is absent in the presence of APOC3 oligonucleotides WV-1308 and WV-2420, indicating that these oligonucleotides are single-stranded RNAi agents capable of mediating RNA interference. Various controls were used: Substrate in the absence of negative control ASO WV-2134; substrate in the presence of negative control ASO WV-2134, which does not mediate RNA interference; substrate in the absence of test oligonucleotide WV-1308; substrate in the absence of test oligonucleotide WV-2420; substrate alone; no substrate, with added WV-2134; and no substrate, with added WV-1308 (data not shown).

[1797] In another experiment, in vitro Ago-2 assay was (for single-stranded RNA interference) performed, using an APOC3 mRNA as a test substrate in a 3′ RACE assay in Hep3B cells. A cleavage product of the APOC3 mRNA in the presence of test oligonucleotide WV-3021 was detected, corresponding to cleavage of the mRNA at a site corresponding to a cut between positions 10 and 11 of WV-3021 (data not shown), which result is consistent with RNA interference. An artifactual cleavage product was also detected.

[1798] In other experiments, dual mechanism (hybrid format) APOC3 oligonucleotide WV-2111 was shown to be capable of mediating knockdown by both RNase H and RNA interference. A RNA substrate for WV-2111, which comprises the sequence of GCUGGCCUCCCAAUAAAGCUGGACA (SEQ ID NO: 1958), which is complementary to the sequence of APOC3 oligonucleotide WV-2111, was found to be cleaved in the presence of WV-2111 at the following positions: GC/UGGC/C/U/CC/CAAUA//AAGCUGGACA (SEQ ID NO: 1959), wherein / indicates a cleavage site in a position typical of RNaseH activity, and // indicates a cleavage site in a position typical of Ago-2 (RNA interference) activity. These data support the idea that WV-2111 mediates knockdown via both RNaseH and RNA interference mechanisms.

[1799] Several oligonucleotides were also found to be capable of mediating RNA interference in an Ago-2 in vitro assay. A RNA test substrate was APOC3 oligonucleotide WV-2372; this substrate disappeared in the presence of APOC3 oligonucleotides WV-1308, WV-2114, WV-2386, or WV-2387 (each tested separately), indicating that each of these oligonucleotides is capable of acting as single-stranded RNAi agents mediating RNA interference.

[1800] While not wishing to be bound by any particular theory, the present disclosure suggests that at least some of the oligonucleotides designated herein as single-stranded RNAi agents mediate knockdown via a RISC (RNA interference silencing complex); however, in at least some experiments, oligonucleotides designated herein as single-stranded RNAi agents were capable of mediating an observed knockdown of the protein level of a target greater than the observed knockdown of the corresponding mRNA level, and, while not wishing to be bound by any particular theory, the present disclosure suggests that this observation is consistent with the conjecture that some oligonucleotides designated herein as single-stranded RNAi agents which are capable of knocking down of a target gene or protein may be able to do so via a RISC-mediated mechanism and/or steric hindrance.

[1801] The present disclosure presents many non-limiting examples of oligonucleotides, having any of various sequences, formats, modifications, 5′-end regions, seed regions, post-seed regions, and 3′-end regions, and which are capable of mediating single-stranded RNA interference (e.g., single-stranded RNAi agents).

[1802] FIG. 3. FIGS. 3A and 3B show example multimer formats. Oligonucleotides can be joined directly and/or through linkers. As illustrated, a multimer can comprise oligonucleotide monomers of the same or different structures/types. In some embodiments, a monomer of a multimer is an ssRNAi agent. In some embodiments, a monomer of a multimer is a RNase H-dependent antisense oligonucleotide (ASO). Monomers can be joined through various positions, for example, the 5′-end, the 3′-end, or positions in between.

[1803] Shown directly below is a phosphoramidite useful for linking oligonucleotide monomers through formation of disulfide linkers. After incorporation into oligonucleotide monomers, a thioester can be hydrolyzed to release a free thiol, which can react with a thiol of another oligonucleotide monomer to form a disulfide bond, thereby linking oligonucleotide monomers together. Multiple thiol groups may be incorporated into oligonucleotides so that multimers of various numbers of monomers may be formed.

[chemical structure]

[1804] Table 90 shows in vitro allele-specific suppression of different oligonucleotides which target PNPLA3. Example oligonucleotides are completely complementary to target sequences of one allele, which target sequences comprise one or two SNP sites. One SNP site is associated with I148M change in protein sequence. Oligonucleotides comprising target-binding sequences that are completely complementary to target sequences comprising both SNPs were assessed in Hep3B cells (wild-type, C and C, I148) and Huh7 cells (with double mutation, T and G, M148). The double mutation was tested at various positions (8 and 11; 9 and 12; 10 and 13; etc.) and with various modifications to identify oligonucleotides capable of allele-specific knockdown of PNPLA3.

[1805] As shown in Table 90B, WV-7778 to WV-7793 and WV-3858 to WV-3864 were tested. In these oligonucleotides, the first and the last internucleotidic linkages in the wings are stereorandom PS and the others are PO; the 5′ wing and the 3′ wing comprise 2′-OMe. Several oligonucleotides demonstrated allele-specific knockdown of PNPLA3.

TABLE 90B
Activity of oligonucleotides.

| | |
|---|---|
| Hep3B | Huh7 |

| mock | 100 | 100 | 100 | 100 |
|---|---|---|---|---|
| WV-7778 | 92.8 | 86.9 | 63.6 | 52.7 |
| WV-7779 | 92.6 | 85.8 | 59.2 | 48.0 |
| WV-7780 | 102.3 | 97.1 | 36.4 | 34.8 |
| WV-7781 | 111.8 | 102.4 | 46.1 | 38.9 |
| WV-7782 | 108.5 | 94.7 | 43.3 | 35.0 |
| WV-7783 | 110.2 | 97.5 | 36.6 | 33.7 |
| WV-7784 | 105.0 | 95.9 | 41.2 | 41.9 |
| WV-7785 | 108.7 | 107.4 | 73.8 | 57.5 |
| WV-3858 | 103.3 | 103.6 | 55.1 | 52.3 |
| WV-3859 | 94.7 | 96.1 | 41.8 | 41.2 |
| WV-3860 | 104.2 | 94.1 | 46.7 | 45.6 |
| WV-3861 | 101.8 | 99.2 | 47.1 | 45.2 |
| WV-3862 | 97.1 | 96.5 | 44.0 | 42.3 |
| WV-3863 | 99.7 | 86.0 | 42.0 | 51.5 |
| WV-3864 | 97.8 | 96.8 | 53.5 | 38.9 |
| WV-7786 | 99.1 | 104.3 | 37.0 | 38.0 |
| WV-7787 | 84.2 | 87.5 | 23.0 | 25.1 |
| WV-7788 | 80.4 | 88.0 | 35.5 | 28.5 |
| WV-7789 | 82.7 | 85.7 | 25.4 | 25.5 |
| WV-7790 | 80.8 | 85.1 | 27.4 | 29.8 |
| WV-7791 | 87.1 | 80.1 | 40.8 | 42.1 |
| WV-7792 | 78.1 | 73.1 | 42.5 | 46.5 |
| WV-7793 | 68.3 | 65.1 | 49.9 | 44.9 |

[1806] As shown in Table 90C, WV-7794 to WV-7816 were tested. In these oligonucleotides, the first and the last internucleotidic linkages in the wings are stereorandom PS and the others are PO; the 5′ wing and the 3′ wing comprise 2′-MOE. Several oligonucleotides demonstrated allele-specific knockdown of PNPLA3.

TABLE 90C
Activity of oligonucleotides.

| | |
|---|---|
| Hep3B | Huh7 |

| mock | 100 | 100 | 100 | 100 |
|---|---|---|---|---|
| WV-7794 | 47.6 | 44.5 | 25.0 | 20.6 |
| WV-7795 | 58.5 | 52.8 | 14.3 | 14.8 |
| WV-7796 | 54.6 | 56.4 | 16.3 | 15.5 |
| WV-7797 | 75.1 | 74.2 | 13.5 | 12.8 |
| WV-7798 | 78.4 | 79.8 | 11.9 | 13.7 |
| WV-7799 | 89.9 | 92.4 | 23.5 | 25.7 |
| WV-7800 | 93.6 | 92.2 | 34.1 | 29.9 |
| WV-7801 | 90.3 | 90.3 | 38.4 | 29.3 |
| WV-7802 | 101.1 | 101.3 | 25.1 | 29.6 |
| WV-7803 | 102.0 | 103.2 | 24.8 | 25.8 |
| WV-7804 | 95.9 | 97.2 | 27.8 | 32.7 |
| WV-7805 | 100.5 | 95.5 | 21.9 | 22.0 |
| WV-7806 | 110.6 | 105.4 | 22.0 | 21.2 |
| WV-7807 | 96.2 | 101.5 | 21.1 | 23.8 |
| WV-7808 | 95.5 | 101.0 | 21.5 | 18.8 |
| WV-7809 | 85.3 | 84.2 | 17.1 | 15.7 |
| WV-7810 | 92.0 | 95.9 | 25.2 | 21.6 |
| WV-7811 | 100.1 | 100.0 | 26.6 | 27.1 |
| WV-7812 | 79.5 | 82.1 | 22.3 | 21.1 |
| WV-7813 | 83.7 | 76.2 | 23.7 | 18.2 |
| WV-7814 | 87.8 | 82.8 | 44.3 | 39.2 |
| WV-7815 | 78.1 | 74.8 | 45.3 | 37.1 |
| WV-7816 | 59.5 | 52.4 | 24.5 | 20.5 |

[1807] As shown in Table 90D, WV-7817 to WV-7839 were tested. In these oligonucleotides, the first and the last nucleotide are LNA; the 5′ wing has a LNA at the 5′ end of the oligonucleotide followed by several 2′-OMe; and the 3′ wing has several 2′-OMe followed by a LNA at the 3′ end of the oligonucleotide. Several oligonucleotides demonstrated allele-specific knockdown of PNPLA3.

TABLE 90D
Activity of oligonucleotides.

| | |
|---|---|
| Hep3B | Huh7 |

| mock | 100 | 100 | 100 | 100 |
|---|---|---|---|---|
| WV-7817 | 71.4 | 60.1 | 34.0 | 30.2 |
| WV-7818 | 68.1 | 75.8 | 44.0 | 30.0 |
| WV-7819 | 68.5 | 76.6 | 20.7 | 20.7 |
| WV-7820 | 87.7 | 86.0 | 24.0 | 22.4 |
| WV-7821 | 90.1 | 89.3 | 17.7 | 15.3 |
| WV-7822 | 101.2 | 87.2 | 19.6 | 11.7 |
| WV-7823 | 83.3 | 87.7 | 22.9 | 17.8 |
| WV-7824 | 99.0 | 101.9 | 31.1 | 31.6 |
| WV-7825 | 94.0 | 89.5 | 28.7 | 22.6 |
| WV-7826 | 95.6 | 87.5 | 21.2 | 17.6 |
| WV-7827 | 113.3 | 104.4 | 22.1 | 19.3 |
| WV-7828 | 108.1 | 102.8 | 25.7 | 23.6 |
| WV-7829 | 99.8 | 97.9 | 20.5 | 21.7 |
| WV-7830 | 95.9 | 87.8 | 18.5 | 19.2 |
| WV-7831 | 89.8 | 89.2 | 21.3 | 23.4 |
| WV-7832 | 76.2 | 71.7 | 9.4 | 11.8 |
| WV-7833 | 68.2 | 76.8 | 14.1 | 10.4 |
| WV-7834 | 69.5 | 71.2 | 17.4 | 16.5 |
| WV-7835 | 69.6 | 68.7 | 11.0 | 9.4 |
| WV-7836 | 59.8 | 67.8 | 18.3 | 21.0 |
| WV-7837 | 60.8 | 63.7 | 25.6 | 28.4 |
| WV-7838 | 48.2 | 50.5 | 16.8 | 13.5 |
| WV-7839 | 35.0 | 39.1 | 10.5 | 11.8 |

[1808] As shown in Table 90E, WV-7840 to WV-7862 were tested. In these oligonucleotides, the first and the last nucleotide are LNA; the 5′ wing has a LNA at the 5′ end of the oligonucleotide followed by several 2′-MOE; and the 3′ wing has several 2′-MOE (or 5-methyl 2′-MOE) followed by a LNA at the 3′ end of the oligonucleotide. Several oligonucleotides demonstrated allele-specific knockdown of PNPLA3.

TABLE 90E
Activity of oligonucleotides.

| | |
|---|---|
| Hep3B | Huh7 |

| mock | 100 | 100 | 100 | 100 |
|---|---|---|---|---|
| WV-7840 | 32.7 | 37.7 | 12.8 | 14.8 |
| WV-7841 | 45.9 | 49.8 | 8.1 | 10.6 |
| WV-7842 | 43.2 | 50.4 | 7.6 | 7.0 |
| WV-7843 | 53.7 | 61.0 | 8.7 | 10.6 |
| WV-7844 | 69.2 | 69.0 | 14.3 | 14.9 |
| WV-7845 | 80.8 | 83.7 | 15.0 | 13.7 |
| WV-7846 | 77.1 | 86.3 | 16.5 | 15.7 |
| WV-7847 | 85.2 | 96.4 | 18.5 | 15.6 |
| WV-7848 | 87.2 | 89.4 | 21.7 | 18.0 |
| WV-7849 | 65.0 | 74.2 | 17.2 | 16.7 |
| WV-7850 | 98.8 | 107.4 | 15.3 | 18.7 |
| WV-7851 | 105.0 | 95.8 | 11.4 | 15.9 |
| WV-7852 | 113.7 | 86.9 | 14.2 | 14.2 |
| WV-7853 | 108.5 | 90.7 | 10.1 | 14.3 |
| WV-7854 | 109.6 | 94.9 | 11.3 | 12.4 |
| WV-7855 | 81.9 | 82.8 | 7.4 | 5.4 |
| WV-7856 | 86.3 | 82.0 | 11.5 | 11.2 |
| WV-7857 | 95.3 | 78.1 | 14.6 | 15.6 |
| WV-7858 | 63.0 | 66.3 | 8.6 | 9.8 |
| WV-7859 | 65.4 | 61.5 | 12.9 | 15.9 |
| WV-7860 | 69.4 | 70.0 | 30.4 | 34.2 |
| WV-7861 | 51.9 | 49.0 | 14.8 | 26.8 |
| WV-7862 | 37.4 | 41.3 | 10.4 | 11.2 |

[1809] As shown in Table 90F, WV-993, WV-3390, and WV-4054 were tested.

TABLE 90F
Activity of oligonucleotides.

| | |
|---|---|
| Hep3B | Huh7 |

| mock | 100.0 | 100.0 | 100.0 | 100.0 |
|---|---|---|---|---|
| UT (untreated) | 92.4 | 98.7 | 93.1 | 107.0 |
| WV-993 10 nM | 108.0 | 117.8 | 115.8 | 137.6 |
| WV-3390 2 nM | 84.5 | 84.1 | 46.5 | 57.6 |
| WV-3390 10 nM | 50.0 | 53.9 | 15.7 | 24.4 |
| WV-4054 2 nM | 95.8 | 95.1 | 30.0 | 35.7 |
| WV-4054 10 nM | 85.5 | 91.8 | 30.2 | 37.5 |

[1810] As shown in Table 90G, WV-3860 to WV-3864 were tested. Oligonucleotides had mismatches (between wildtype and mutant alleles) at positions 8 and 11 (WV-3860); 9 and 12 (WV-3861); 10 and 13 (WV-3862); 11 and 14 (WV-3863); and 12 and 15 (WV-3864). Several oligonucleotides demonstrated allele-specific knockdown of PNPLA3, particularly at a concentration of 8 nM.

TABLE 90G
Activity of oligonucleotides.

| nM | WV-3860 Hep3B | | WV-3861 Hep3B | | WV-3862 Hep3B | | WV-3863 Hep3B | |
|---|---|---|---|---|---|---|---|---|
| 50 | 37.7 | 44.4 | 44.3 | 47.7 | 21.9 | 32.3 | 32.0 | 32.8 |
| 20 | 83.9 | 89.7 | 87.7 | 93.9 | 64.7 | 72.1 | 81.7 | 87.3 |
| 8 | 95.8 | 95.4 | 101.9 | 103.4 | 90.8 | 92.0 | 84.3 | 93.9 |
| 3.2 | 105.9 | 93.0 | 94.3 | 90.7 | 98.1 | 98.3 | 88.3 | 86.8 |
| 1.28 | 100.9 | 93.4 | 81.0 | 95.4 | 91.0 | 92.7 | 90.9 | 87.4 |
| 0.512 | 90.5 | 96.6 | 94.9 | 88.3 | 92.5 | 93.3 | 87.1 | 88.7 |
| 0.205 | 110.1 | 99.0 | 93.2 | 95.4 | 95.7 | 89.5 | 89.7 | 92.5 |
| 0.082 | 96.6 | 95.6 | 94.8 | 96.2 | 95.3 | 97.8 | 86.7 | 93.9 |
| 0.033 | 98.5 | 88.1 | 98.0 | 95.3 | 103.7 | 93.2 | 93.3 | 87.8 |
| 0.013 | 97.1 | 95.6 | 91.1 | 92.4 | 100.9 | 90.9 | 91.7 | 90.9 |
| nM | WV-3864 Hep3B | | WV-3860 Huh7 | | WV-3861 Huh7 | | WV-3862 Huh7 | |
| 50 | 31.8 | 43.9 | 11.4 | 9.3 | 12.4 | 8.4 | 6.8 | 8.4 |
| 20 | 98.4 | 99.4 | 23.7 | 25.9 | 25.9 | 24.4 | 16.8 | 14.0 |
| 8 | 100.7 | 107.4 | 47.9 | 51.3 | 46.0 | 44.0 | 40.7 | 42.6 |
| 3.2 | 94.9 | 102.7 | 84.1 | 67.6 | 63.7 | 68.7 | 56.9 | 77.6 |
| 1.28 | 96.3 | 95.6 | 100.5 | 83.9 | 80.4 | 83.7 | 77.3 | 81.0 |
| 0.512 | 89.7 | 102.4 | 100.5 | 97.3 | 85.9 | 87.5 | 78.0 | 85.6 |
| 0.205 | 96.3 | 93.8 | 101.6 | 99.9 | 83.7 | 76.6 | 73.4 | 85.7 |
| 0.082 | 89.5 | 92.1 | 81.4 | 87.3 | 85.3 | 84.1 | 78.9 | 89.3 |
| 0.033 | 92.7 | 94.2 | 114.4 | 90.6 | 100.4 | 87.6 | 87.5 | 84.6 |
| 0.013 | 91.7 | 106.0 | 107.0 | 93.7 | 82.3 | 88.1 | 78.3 | 91.6 |

| nM | WV-3863 Huh7 | | WV-3864 Huh7 | |
|---|---|---|---|---|
| 50 | 5.6 | 10.6 | 8.4 | 8.3 |
| 20 | 20.0 | 13.4 | 16.5 | 13.9 |
| 8 | 37.4 | 40.8 | 47.9 | 43.3 |
| 3.2 | 67.5 | 60.5 | 75.6 | 65.5 |
| 1.28 | 84.9 | 82.5 | 86.2 | 87.0 |
| 0.512 | 79.4 | 81.1 | 95.6 | 91.0 |
| 0.205 | 83.0 | 86.3 | 89.1 | 96.1 |
| 0.082 | 79.5 | 92.5 | 89.4 | 77.9 |
| 0.033 | 79.7 | 102.1 | 104.6 | 86.4 |
| 0.013 | 94.6 | 96.8 | 93.0 | 104.9 |

[1811] As shown in Table 90H, WV-7804 to WV-7808 were tested. Oligonucleotides had mismatches at positions 8 and 11 (WV-7804); 9 and 12 (WV-7805); 10 and 13 (WV-7806); 11 and 14 (WV-7807); and 12 and 15 (WV-7808). Some oligonucleotides demonstrated allele-specific knockdown of PNPLA3, particularly at concentrations of 3.2 and 8 nM.

TABLE 90H
Activity of oligonucleotides.

| nM | WV-7804 Hep3B | | WV-7805 Hep3B | | WV-7806 Hep3B | | WV-7807 Hep3B | |
|---|---|---|---|---|---|---|---|---|
| 50 | 63.3 | 69.5 | 60.3 | 62.7 | 69.6 | 65.1 | 75.0 | 75.5 |
| 20 | 84.6 | 98.4 | 81.8 | 86.1 | 90.1 | 89.4 | 95.3 | 95.4 |
| 8 | 101.1 | 102.9 | 96.9 | 98.5 | 100.8 | 94.7 | 101.2 | 95.5 |
| 3.2 | 92.9 | 95.1 | 90.7 | 98.1 | 98.9 | 92.1 | | 88.8 |
| 1.28 | 95.5 | 98.6 | 91.3 | 97.0 | 95.9 | 90.9 | 97.3 | 103.6 |
| 0.512 | 96.2 | 110.4 | 95.5 | 97.9 | 95.9 | 94.8 | 100.9 | 92.7 |
| 0.205 | 92.0 | 99.5 | 90.5 | 100.7 | 99.3 | 94.7 | 96.4 | 99.8 |
| 0.082 | 97.6 | 93.6 | 92.2 | 107.6 | 92.3 | 93.8 | 93.4 | 103.7 |
| 0.033 | 98.4 | 101.4 | 98.5 | 104.0 | 99.6 | 90.1 | 89.2 | 93.3 |
| 0.013 | 96.7 | 100.4 | 95.0 | 105.8 | 90.1 | 97.5 | 90.6 | 87.5 |

| nM | WV-7808 Hep3B | WV-7804 Huh7 | | WV-7805 Huh7 | | WV-7806 Huh7 | |
|---|---|---|---|---|---|---|---|
| 50 | 72.2 | 4.4 | 7.5 | 1.7 | 8.4 | 9.8 | 3.8 |
| 20 | 98.9 | 3.5 | 11.1 | 7.1 | 11.9 | 2.8 | 7.2 |
| 8 | 117.8 | 25.1 | 23.3 | 19.6 | 11.6 | 13.8 | 12.5 |
| 3.2 | 109.5 | 45.3 | 48.0 | 36.1 | 38.4 | 28.8 | 39.7 |
| 1.28 | 116.3 | 68.9 | 77.1 | 59.2 | 76.2 | 68.7 | 68.5 |
| 0.512 | 110.9 | 74.6 | 76.0 | 75.3 | 78.4 | 66.6 | 82.4 |
| 0.205 | 109.3 | 73.6 | 86.5 | 69.8 | 81.1 | 69.7 | 80.3 |
| 0.082 | 116.8 | 82.9 | 89.4 | 75.0 | 86.9 | 78.6 | 79.7 |
| 0.033 | 111.1 | 81.8 | 96.1 | 78.0 | 95.8 | 89.4 | 87.3 |
| 0.013 | 104.6 | 86.7 | 90.4 | 79.6 | 95.0 | 88.6 | 98.0 |

| nM | WV-7807 Huh7 | | WV-7808 Huh7 | |
|---|---|---|---|---|
| 50 | 3.0 | 3.9 | 1.8 | 1.4 |
| 20 | 12.6 | 9.1 | 1.9 | 5.2 |
| 8 | 25.1 | 14.9 | 14.2 | 9.1 |
| 3.2 | 46.9 | 41.5 | 37.1 | 33.2 |
| 1.28 | 78.0 | 70.4 | 63.6 | 65.2 |
| 0.512 | 85.3 | 73.7 | 71.0 | 77.4 |
| 0.205 | 98.8 | 68.5 | 79.2 | 92.3 |
| 0.082 | 92.6 | 75.3 | 88.0 | 71.2 |
| 0.033 | 85.6 | 81.9 | 84.1 | 83.5 |
| 0.013 | 85.5 | 94.7 | 95.3 | 78.1 |

[1812] As shown in Table 901, WV-7827 to WV-7831 were tested. Oligonucleotides had mismatches at positions 8 and 11 (WV-7827); 9 and 12 (WV-7828); 10 and 13 (WV-7829); 11 and 14 (WV-7830); and 12 and 15 (WV-7831). Several oligonucleotides demonstrated allele-specific knockdown of PNPLA3, particularly at concentrations of 3.2 and 8 nM.

TABLE 90I
Activity of oligonucleotides.

| nM | WV-7827 Hep3B | | WV-7828 Hep3B | | WV-7829 Hep3B | | WV-7830 Hep3B | |
|---|---|---|---|---|---|---|---|---|
| 50 | 37.01 | 34.29 | 36.95 | 32.75 | 25.05 | 33.48 | 36.76 | 54.22 |
| 20 | 79.06 | 85.05 | 85.88 | 77.16 | 82.21 | 79.79 | 79.33 | 87.62 |
| 8 | 97.28 | 89.87 | 93.46 | 91.76 | 99.65 | 98.83 | 97.94 | 97.83 |
| 3.2 | 94.15 | 89.12 | 97.63 | 90.63 | 92.57 | 92.37 | | 104.59 |
| 1.28 | 97.02 | 95.4 | 94.2 | 88.81 | 93.55 | 94.13 | 100.19 | 113.12 |
| 0.512 | 105.31 | 93.06 | 97.26 | 96.7 | 95.81 | 104.04 | 107.33 | 109.89 |
| 0.205 | 107.16 | 97.39 | 92 | 91.65 | 103.76 | 102.33 | 104.56 | 100.78 |
| 0.082 | 100.92 | 101.71 | 94.43 | 88.97 | 93.95 | 105.59 | 94.95 | 110.09 |
| 0.033 | 98.82 | 95.76 | 92.83 | 92.84 | 91.46 | 103.11 | 97.7 | 93.54 |
| 0.013 | 96.78 | 93.38 | 92.91 | 90.28 | 86.25 | 104.33 | 96.73 | 98.6 |

| nM | WV-7831 Hep3B | | WV-7827 Huh7 | | WV-7828 Huh7 | | WV-7829 Huh7 | |
|---|---|---|---|---|---|---|---|---|
| 50 | 53.44 | 62.49 | 3.75 | 3.01 | 2.29 | 1.48 | 5.61 | 7.19 |
| 20 | 97.35 | 92.9 | 6.33 | 5.79 | 16.31 | 9.08 | 16.41 | 9.26 |
| 8 | 103.88 | 103.69 | 13.45 | 13.44 | 9.77 | 24.96 | 31.07 | 18.62 |
| 3.2 | 104.8 | 99.48 | 34.11 | 44.07 | 31.43 | 31.51 | 54.15 | 31.49 |
| 1.28 | 99.77 | 102.88 | 57.91 | 67.23 | 63.32 | 69.34 | 78.28 | 65.69 |
| 0.512 | 102.56 | 99.81 | 80.58 | 87.32 | 83.18 | 75.78 | 94.09 | 75.96 |
| 0.205 | 111.83 | 98.89 | 71.87 | 84.73 | 74.94 | 76.52 | 87.05 | 90.6 |
| 0.082 | 102.02 | 93.55 | 74.43 | 76.07 | 82.31 | 87.03 | 97.43 | 87.48 |
| 0.033 | 93.54 | 101.84 | 77.64 | 80.62 | 89.1 | 89.96 | 108.41 | 81.93 |
| 0.013 | 101.47 | 100.78 | 77.47 | 74.02 | 83.14 | 79.83 | 100.58 | 88.97 |

| nM | WV-7830 Huh7 | | WV-7831 Huh7 | |
|---|---|---|---|---|
| 50 | 4.11 | 5.5 | 3.5 | 5.45 |
| 20 | 6.32 | 5.86 | 5.62 | 10.22 |
| 8 | 12.5 | 16.99 | 15.15 | 23.97 |
| 3.2 | 35.34 | 40.2 | 35 | 40.3 |
| 1.28 | 56.82 | 76.27 | 73.64 | 73.96 |
| 0.512 | 86.38 | 77.53 | 83.87 | 88.08 |
| 0.205 | 80.08 | 79.81 | 85.02 | 86.98 |
| 0.082 | 95.69 | 98.61 | 82.31 | 111.77 |
| 0.033 | 86.65 | 93.2 | 85.86 | 85.82 |
| 0.013 | 94.2 | 85.75 | 81.84 | 93.28 |

[1813] As shown in Table 90J, WV-993 (negative control), WV-3390 (positive control), WV-4054, WV-7850 to WV-7854 were tested. The oligonucleotides had mismatches at positions 8 and 11 (WV-7850); 9 and 12 (WV-7851); 10 and 13 (WV-7852); 11 and 14 (WV-7853); and 12 and 15 (WV-7854). Several oligonucleotides demonstrated high allele-specific knockdown of PNPLA3, particularly at concentrations of 3.2 and 8 nM.

TABLE 90J
Activity of oligonucleotides.

| nM | WV-7850 Hep3B | | WV-7851 Hep3B | | WV-7852 Hep3B | | WV-7853 Hep3B | |
|---|---|---|---|---|---|---|---|---|
| 50 | 38.95 | 43.11 | 38.2 | 54.32 | 34.89 | 44.6 | 28.33 | 29.79 |
| 20 | 65.77 | 72.48 | 80.99 | 84.09 | 69.74 | 74.87 | 66.38 | 50.49 |
| 8 | 92.95 | 82.91 | 93.58 | 96.06 | 89.54 | 101.29 | 85.15 | 81.31 |
| 3.2 | 91.26 | 86.61 | 90.46 | 94.37 | 97.29 | 91.77 | | 96.08 |
| 1.28 | 111.06 | 94.39 | 98.64 | 92.99 | 89.98 | 111.31 | 96.26 | 97.11 |
| 0.512 | 106.14 | 87.28 | 94.61 | 94.09 | 96.79 | 95.82 | 109.19 | 105.33 |
| 0.205 | 84.62 | 87.72 | 100.09 | 99.5 | 111.54 | 99.81 | 95.06 | 94.02 |
| 0.082 | 97.3 | 89.13 | 90.19 | 87.13 | 92.11 | 100.64 | 95.93 | 104.77 |
| 0.033 | 88.83 | 89.09 | 96.09 | 101.92 | 96.1 | 95.83 | 95.56 | 95.83 |
| 0.013 | 91.98 | 92.51 | 100.59 | 92.81 | 98.94 | 109.53 | 99.05 | 97.36 |

| nM | WV-7854 Hep3B | | WV-7850 Huh7 | | WV-7851 Huh7 | | WV-7852 Huh7 | |
|---|---|---|---|---|---|---|---|---|
| 50 | 16.7 | 18.84 | 2.74 | 4.3 | 2.13 | 1.26 | 8.39 | 7.43 |
| 20 | 63.04 | 59.9 | 5.33 | 5.88 | 6.09 | 4.64 | 7.76 | 5.84 |
| 8 | 82.27 | 80.67 | 11.67 | 9.74 | 1.12 | 14.86 | 9.96 | 10.6 |
| 3.2 | 92.77 | 89.43 | 25.14 | 13.84 | 31.45 | 25.89 | 28.6 | 25.4 |
| 1.28 | 90.63 | 83.96 | 57.25 | 62.49 | 55.19 | 52.3 | 49.96 | 56.13 |
| 0.512 | 88.27 | 86.56 | 75.21 | 73.3 | 81.73 | 81.67 | 72.77 | 87.64 |
| 0.205 | 89.69 | 88.92 | 71.16 | 74.28 | 91.84 | 94.95 | 82.61 | 85.11 |
| 0.082 | 95.16 | 89.43 | 84.71 | 75.77 | 91 | 79.62 | 96.22 | 83.67 |
| 0.033 | 99.41 | 94.3 | 80.67 | 93.66 | 84.27 | 79.5 | 72.16 | 70.12 |
| 0.013 | 88 | 96.49 | 96.84 | 104.2 | 86.94 | 81.37 | 94.13 | 88.49 |

| nM | WV-7853 Huh7 | | WV-7854 Huh7 | |
|---|---|---|---|---|
| 50 | 2.91 | 3.83 | 0.56 | 5.35 |
| 20 | 5.38 | 4.3 | 2.43 | 7.48 |
| 8 | 6.36 | 8.51 | 9.91 | 10.31 |
| 3.2 | 27.05 | 23.79 | 23.52 | 22.24 |
| 1.28 | 47.78 | 62.17 | 47.66 | 45.94 |
| 0.512 | 70.13 | 93.78 | 76.63 | 66.5 |
| 0.205 | 96.01 | 74.6 | 84.06 | 72.69 |
| 0.082 | 82.68 | 90.37 | 79.33 | 82.72 |
| 0.033 | 89.38 | 93.35 | 89.39 | 83.68 |
| 0.013 | 86.29 | 95.77 | 98.79 | 96.55 |

[1814] As shown in Table 90K and 90L, WV-3860 to WV-3864, WV-7804 to WV-7808, WV-7827 to WV-7831, and WV-7850 to WV-7854 were tested. WV-4054 demonstrated high allele-specific activity.

TABLE 90K
Activity of oligonucleotides.

| | | |
|---|---|---|
| nM | WV-3390 Hep3B | WV-3390 Huh7 |

| | | | | |
|---|---|---|---|---|
| 50 | 8.21 | 7.25 | 8.29 | 8.93 |
| 20 | 6.38 | 7.65 | 8.38 | 6.55 |
| 8 | 12.25 | 18.67 | 14.29 | 10.45 |
| 3.2 | 45.11 | 53.94 | 44.3 | 57.9 |
| 1.28 | 77.33 | 87.7 | 75.75 | 79.58 |
| 0.512 | 89.66 | 91.59 | 75.55 | 114.48 |
| 0.205 | 88.47 | 99.01 | 77.44 | 93.14 |
| 0.082 | 90.52 | 101.67 | 81.19 | 91 |
| 0.033 | 100.47 | 102.34 | 78.08 | 106.05 |
| 0.013 | 111.98 | 101.98 | 93.49 | 92.23 |

| | | |
|---|---|---|
| nM | WV-4054 Hep3B | WV-4054 Huh7 |

| | | | | |
|---|---|---|---|---|
| 8 | 77.1 | 75.46 | 25.4 | 28.99 |
| 3.2 | 64.83 | 77.36 | 19.76 | 30.45 |
| 1.28 | 75.7 | 80.58 | 20.26 | 28 |
| 0.512 | 83.19 | 91.18 | 27.99 | 30.12 |
| 0.205 | 96.79 | 100.8 | 48.79 | 51.24 |
| 0.082 | 96.97 | 105.15 | 51.71 | 65.92 |
| 0.033 | 98.21 | 96.76 | 82.73 | 90.69 |
| 0.013 | 100.71 | 110.73 | 89.25 | 101.52 |

| | | |
|---|---|---|
| nM | WV-993 Hep3B | WV-993 Huh7 |

| | | | | |
|---|---|---|---|---|
| 50 | 46.96 | 63.05 | 64.33 | 84.69 |
| 20 | 85.99 | 93.33 | 85.91 | 92.58 |
| 8 | 94.55 | 112.34 | 108.31 | 90.19 |
| 3.2 | 94.42 | 101.21 | 98.4 | 102.07 |
| 1.28 | 90.96 | 98.52 | 104.92 | 108.34 |
| 0.512 | 87.71 | 95.84 | 96.98 | 87.06 |
| 0.205 | 91.78 | 93.62 | 114.92 | 90.64 |
| 0.082 | 86.49 | 96.33 | 109.17 | 101.77 |
| 0.033 | 87.45 | 104.34 | 102.65 | 92.43 |
| 0.013 | 90.55 | 100.97 | 114.84 | 108.07 |

TABLE 90L
IC50 of various oligonucleotides in Huh7 cells (mutant allele).

| Mismatch | Oligonucleotides | IC₅₀ | Oligonucleotides | IC₅₀ |
|---|---|---|---|---|
| Positions | 2′OMe | (nM) | 2′MOE | (nM) |
| 8, 11 | WV-3860 | 10.6 | WV-7804 | 4.0 |
| 9, 12 | WV-3861 | 10.4 | WV-7805 | 3.0 |
| 10, 13 | WV-3862 | 10.6 | WV-7806 | 2.6 |
| 11, 14 | WV-3863 | 7.8 | WV-7807 | 4.0 |
| 12, 15 | WV-3864 | 9.5 | WV-7808 | 2.9 |
| Mismatch | Oligonucleotides | IC₅₀ | Oligonucleotides | IC₅₀ |
| Positions | 2′MOE LNA | (nM) | 2′OMe LNA | (nM) |
| 8, 11 | WV-7850 | 1.6 | WV-7827 | 3.8 |
| 9, 12 | WV-7851 | 2.2 | WV-7828 | 2.8 |
| 10, 13 | WV-7852 | 1.9 | WV-7829 | 3.0 |
| 11, 14 | WV-7853 | 1.8 | WV-7830 | 2.6 |
| 12, 15 | WV-7854 | 1.3 | WV-7831 | 3.3 |

TABLE 91
Activity of oligonucleotides.
PNPLA3 mRNA level
(PNPLA3/HPRT1)

| | Conc (nM) exp 10 | | | | | | | |
|---|---|---|---|---|---|---|---|---|
| | 1.477 | 1.079 | 0.681 | 0.283 | −0.114 | −0.512 | −0.910 | −1.308 |
| WV-7808 | 0.200 | 0.366 | 0.424 | 0.576 | 0.803 | 0.910 | 1.217 | 1.131 |
| | 0.081 | 0.221 | 0.374 | 0.613 | 0.987 | 1.050 | 1.314 | 1.080 |
| WV-8690 | 0.199 | 0.388 | 0.503 | 0.808 | 0.897 | 1.000 | 1.148 | 1.068 |
| | 0.208 | 0.313 | 0.754 | 0.932 | 1.058 | 1.236 | 1.286 | 1.138 |
| WV-8858 | 0.233 | 0.446 | 0.595 | 0.838 | 0.911 | 0.916 | 0.965 | 1.213 |
| | 0.240 | 0.340 | 0.727 | 1.036 | 1.039 | 1.403 | 0.874 | |
| WV-8859 | 0.086 | 0.292 | 0.279 | 0.710 | 0.850 | 1.071 | 0.956 | 1.091 |
| | 0.083 | 0.217 | 0.505 | 0.754 | 0.981 | 1.258 | 1.131 | 1.454 |
| WV-8860 | 0.234 | 0.386 | 0.385 | 0.751 | 0.867 | 0.947 | 1.358 | 1.057 |
| | 0.162 | 0.321 | 0.503 | 1.002 | 1.100 | 1.075 | 1.250 | 1.241 |

TABLE 92
Activity of oligonucleotides.

| | 1.477 | 1.079 | 0.681 | 0.283 | −0.115 | −0.513 | −0.911 | −1.308 |
|---|---|---|---|---|---|---|---|---|
| WV-7807 | 0.102 | 0.331 | 0.588 | 0.790 | 1.037 | 0.989 | 1.271 | 1.147 |
| | 0.137 | 0.397 | 0.453 | 0.814 | 1.160 | 1.099 | 1.257 | 1.027 |
| WV-8854 | 0.117 | 0.375 | 0.678 | 0.831 | 0.962 | 1.021 | 1.258 | 1.277 |
| | 0.112 | 0.363 | 0.559 | 0.793 | 1.134 | 1.237 | 1.226 | 1.186 |
| WV-8855 | 0.174 | 0.553 | 0.745 | 0.873 | 0.890 | 0.968 | 0.954 | 1.088 |
| | 0.181 | 0.462 | 0.690 | 0.737 | 1.102 | 1.168 | 0.930 | 1.006 |
| WV-8856 | 0.055 | 0.239 | 0.496 | 0.779 | 0.815 | 0.937 | 1.029 | 1.027 |
| | 0.069 | 0.288 | 0.654 | 0.884 | 1.172 | 1.146 | 0.937 | 1.222 |
| WV-8857 | 0.237 | 0.445 | 0.967 | 0.928 | 0.976 | 0.790 | 0.992 | 1.119 |
| | 0.188 | 0.504 | 0.783 | 0.932 | 1.031 | 1.046 | 1.086 | 1.067 |

TABLE 93
Activity of oligonucleotides.

| | 1.477 | 1.079 | 0.681 | 0.283 | −0.114 | −0.512 | −0.910 | −1.308 |
|---|---|---|---|---|---|---|---|---|
| WV-7806 | 0.15 | 0.24 | 0.29 | 0.71 | 0.92 | 1.03 | 1.02 | 1.10 |
| | 0.14 | 0.16 | 0.30 | 0.56 | 0.67 | 0.84 | 1.02 | 0.89 |
| WV-8850 | 0.57 | 0.61 | 0.59 | 1.09 | 1.08 | 1.04 | 1.11 | 1.29 |
| | 0.44 | 0.52 | 0.60 | 0.65 | 0.81 | 0.76 | 0.96 | 0.93 |
| WV-8851 | 0.18 | 0.41 | 0.43 | 0.95 | 0.93 | 1.00 | 1.08 | 1.05 |
| | 0.17 | 0.27 | 0.63 | 0.71 | 0.70 | 1.01 | 0.90 | 0.85 |
| WV-8852 | 0.55 | 0.29 | 0.32 | 0.83 | 1.04 | 1.23 | 0.90 | 1.28 |
| | 0.14 | 0.18 | 0.26 | 0.49 | 0.77 | 0.83 | 1.09 | 0.92 |
| WV-8853 | 0.21 | 0.38 | 0.41 | 0.76 | 1.24 | 0.92 | 1.08 | 0.93 |
| | 0.13 | 0.20 | 0.44 | 0.61 | 0.94 | 0.64 | 0.87 | 0.95 |

TABLE 94
Activity of oligonucleotides.

| | 1.477 | 1.079 | 0.681 | 0.283 | −0.114 | −0.512 | −0.910 | −1.308 |
|---|---|---|---|---|---|---|---|---|
| WV-7805 | 0.29 | 0.33 | 0.44 | 0.72 | 0.95 | 0.96 | 0.93 | 0.99 |
| | 0.15 | 0.27 | 0.41 | 0.73 | 1.12 | 1.19 | 0.78 | 0.87 |
| WV-8609 | 0.33 | 0.37 | 0.48 | 0.90 | 0.84 | 0.81 | 1.02 | 1.04 |
| | 0.13 | 0.29 | 0.56 | 0.76 | 0.89 | 1.15 | 1.07 | 0.91 |
| WV-8847 | 0.24 | 0.37 | 0.58 | 0.78 | 0.89 | 1.20 | 0.91 | 0.97 |
| | 0.14 | 0.23 | 0.64 | 0.79 | 0.90 | 1.16 | 0.94 | 1.19 |
| WV-8848 | 0.19 | 0.32 | 0.47 | 0.69 | 0.93 | 0.88 | 0.92 | 0.92 |
| | 0.19 | 0.16 | 0.46 | 0.74 | 0.88 | 0.79 | 1.03 | 1.09 |
| WV-8849 | 0.24 | 0.39 | 0.55 | 0.79 | 1.17 | 0.97 | 1.16 | 0.95 |
| | 0.28 | 0.29 | 0.54 | 0.82 | 1.05 | 1.13 | 1.17 | 1.05 |

TABLE 95

| | 1.477 | 1.079 | 0.681 | 0.283 | −0.114 | −0.512 | −0.910 | −1.308 |
|---|---|---|---|---|---|---|---|---|
| WV-7804 | 0.29 | 0.37 | 0.51 | 0.81 | 0.85 | 1.16 | 0.87 | 0.89 |
| | 0.19 | 0.22 | 0.47 | 0.82 | 0.85 | 0.94 | 1.05 | 1.06 |
| WV-8843 | 0.53 | 0.72 | 0.62 | 1.00 | 0.98 | 0.85 | 0.92 | 0.98 |
| | 0.45 | 0.51 | 0.61 | 0.93 | 0.93 | 1.01 | 0.90 | 1.01 |
| WV-8844 | 0.25 | 0.44 | 0.58 | 0.78 | 0.71 | 0.86 | 0.86 | 1.00 |
| | 0.22 | 0.21 | 0.48 | 0.76 | 1.02 | 1.06 | 0.74 | 1.16 |
| WV-8845 | 0.23 | 0.42 | 0.52 | 0.82 | 0.99 | 0.87 | 0.77 | 1.11 |
| | 0.17 | 0.25 | 0.44 | 0.76 | 0.90 | 0.97 | 0.99 | 0.88 |
| WV-8846 | 0.20 | 0.38 | 0.55 | 0.60 | 0.90 | 0.76 | 0.88 | 0.98 |
| | 0.17 | 0.25 | 0.39 | 0.71 | 1.11 | 0.92 | 0.83 | 1.04 |

TABLE 98
Activity of oligonucleotides.
10 nM.

| | |
|---|---|
| Hep3B | Huh7 |

| mock | 100 | 100 | 100 | 100 |
|---|---|---|---|---|
| WV-7794 | 47.6 | 44.5 | 25.0 | 20.6 |
| WV-7795 | 58.5 | 52.8 | 14.3 | 14.8 |
| WV-7796 | 54.6 | 56.4 | 16.3 | 15.5 |
| WV-7797 | 75.1 | 74.2 | 13.5 | 12.8 |
| WV-7798 | 78.4 | 79.8 | 11.9 | 13.7 |
| WV-7799 | 89.9 | 92.4 | 23.5 | 25.7 |
| WV-7800 | 93.6 | 92.2 | 34.1 | 29.9 |
| WV-7801 | 90.3 | 90.3 | 38.4 | 29.3 |
| WV-7802 | 101.1 | 101.3 | 25.1 | 29.6 |
| WV-7803 | 102.0 | 103.2 | 24.8 | 25.8 |
| WV-7804 | 95.9 | 97.2 | 27.8 | 32.7 |
| WV-7805 | 100.5 | 95.5 | 21.9 | 22.0 |
| WV-7806 | 110.6 | 105.4 | 22.0 | 21.2 |
| WV-7807 | 96.2 | 101.5 | 21.1 | 23.8 |
| WV-7808 | 95.5 | 101.0 | 21.5 | 18.8 |
| WV-7809 | 85.3 | 84.2 | 17.1 | 15.7 |
| WV-7810 | 92.0 | 95.9 | 25.2 | 21.6 |
| WV-7811 | 100.1 | 100.0 | 26.6 | 27.1 |
| WV-7812 | 79.5 | 82.1 | 22.3 | 21.1 |
| WV-7813 | 83.7 | 76.2 | 23.7 | 18.2 |
| WV-7814 | 87.8 | 82.8 | 44.3 | 39.2 |
| WV-7815 | 78.1 | 74.8 | 45.3 | 37.1 |
| WV-7816 | 59.5 | 52.4 | 24.5 | 20.5 |

TABLE 99
Activity of oligonucleotides.
10 nM.

| | |
|---|---|
| Hep3B | Huh7 |

| mock | 100 | 100 | 100 | 100 |
|---|---|---|---|---|
| WV-7778 | 92.8 | 86.9 | 63.6 | 52.7 |
| WV-7779 | 92.6 | 85.8 | 59.2 | 48.0 |
| WV-7780 | 102.3 | 97.1 | 36.4 | 34.8 |
| WV-7781 | 111.8 | 102.4 | 46.1 | 38.9 |
| WV-7782 | 108.5 | 94.7 | 43.3 | 35.0 |
| WV-7783 | 110.2 | 97.5 | 36.6 | 33.7 |
| WV-7784 | 105.0 | 95.9 | 41.2 | 41.9 |
| WV-7785 | 108.7 | 107.4 | 73.8 | 57.5 |
| WV-3858 | 103.3 | 103.6 | 55.1 | 52.3 |
| WV-3859 | 94.7 | 96.1 | 41.8 | 41.2 |
| WV-3860 | 104.2 | 94.1 | 46.7 | 45.6 |
| WV-3861 | 101.8 | 99.2 | 47.1 | 45.2 |
| WV-3862 | 97.1 | 96.5 | 44.0 | 42.3 |
| WV-3863 | 99.7 | 86.0 | 42.0 | 51.5 |
| WV-3864 | 97.8 | 96.8 | 53.5 | 38.9 |
| WV-7786 | 99.1 | 104.3 | 37.0 | 38.0 |
| WV-7787 | 84.2 | 87.5 | 23.0 | 25.1 |
| WV-7788 | 80.4 | 88.0 | 35.5 | 28.5 |
| WV-7789 | 82.7 | 85.7 | 25.4 | 25.5 |
| WV-7790 | 80.8 | 85.1 | 27.4 | 29.8 |
| WV-7791 | 87.1 | 80.1 | 40.8 | 42.1 |
| WV-7792 | 78.1 | 73.1 | 42.5 | 46.5 |
| WV-7793 | 68.3 | 65.1 | 49.9 | 44.9 |

TABLE 100
Activity of oligonucleotides.
% mRNA remaining
(RhPNPLA3/hSFRS9)
Monkey hepatocytes at 48 hrs.

| | | |
|---|---|---|
| 10 nM | 3 nM | 1 nM |

| Mock | 100 | 100 | 100 | 100 | 100 | 100 |
|---|---|---|---|---|---|---|
| WV-3421 | 28.7 | 35.4 | 44.6 | 31.8 | 61.3 | 53.8 |
| WV-7794 | 64.1 | 74.4 | 104.3 | 96.2 | 115.5 | 121.3 |
| WV-7795 | 80.8 | 88.4 | 130.2 | 115.9 | 109.0 | 130.0 |
| WV-7796 | 51.3 | 53.4 | 83.8 | 95.5 | 106.9 | 103.3 |
| WV-7797 | 51.4 | 48.5 | 97.3 | 81.4 | 115.1 | 126.7 |
| WV-7798 | 65.2 | 56.8 | 84.8 | 86.8 | 106.8 | 104.0 |
| WV-7799 | 96.5 | 102.5 | 104.7 | 117.6 | 108.9 | 129.6 |
| WV-7800 | 66.1 | 78.8 | 113.3 | 111.3 | 114.9 | 128.1 |
| WV-7801 | 113.1 | 117.7 | 116.0 | 112.7 | 113.3 | 118.5 |
| WV-7802 | 101.6 | 110.7 | 105.8 | 120.3 | 113.3 | 123.9 |
| WV-7803 | 52.5 | 59.6 | 73.6 | 79.4 | 106.5 | 129.4 |
| WV-7804 | 95.5 | 91.3 | 111.3 | 137.4 | 116.5 | 122.1 |
| WV-7805 | 84.7 | 97.8 | 111.7 | 111.1 | 114.3 | 118.7 |
| WV-7806 | 91.2 | 87.2 | 129.7 | 121.3 | 124.8 | 121.8 |
| WV-7807 | 64.5 | 89.2 | 108.5 | 119.7 | 108.6 | 123.7 |
| WV-7808 | 39.4 | 48.1 | 94.7 | 105.8 | 105.1 | 125.5 |
| WV-7809 | 46.5 | 36.8 | 77.0 | 64.9 | 85.1 | 101.2 |
| WV-7810 | 46.7 | 46.5 | 62.1 | 78.5 | 75.8 | 94.7 |
| WV-7811 | 70.4 | 78.7 | 88.2 | 84.0 | 101.1 | 96.6 |
| WV-7812 | 47.2 | 53.3 | 74.5 | 80.7 | 97.7 | 77.8 |
| WV-7813 | 43.0 | 38.3 | 76.5 | 71.2 | 97.0 | 89.7 |
| WV-7814 | 49.8 | 51.2 | 102.8 | 96.1 | 105.9 | 131.8 |
| WV-7815 | 56.0 | 52.5 | 88.3 | 83.8 | 83.4 | 94.9 |
| WV-7816 | 29.3 | 19.7 | 51.5 | 57.5 | 84.4 | 68.4 |

TABLE 101
Activity of oligonucleotides.
PNPLA3 mRNA Level
(PNPLA3/GAPDH)

| | 0.12 nM | 0.4 nM | 1.1. nM |
|---|---|---|---|
| WV-993 | 99.8 | 77.9 | 74.5 |
| WV-3421 | 74.9 | 44.6 | 24.0 |
| WV-7805 | 105.4 | 99.2 | 83.8 |
| WV-9890 | 108.6 | 78.4 | 78.3 |
| WV-12100 | 104.6 | 102.7 | 93.2 |
| WV-9893 | 93.7 | 103.8 | 79.8 |
| WV-12101 | 124.1 | 67.6 | 36.6 |

TABLE 102A
Activity of oligonucleotides.
Primary cyno hepatocytes.

| Conc. (nM) | WV-9893 | | WV-3421 | | WV-12101 | |
|---|---|---|---|---|---|---|
| 1.079181 | 116.7 | 90.2 | 13.6 | 6.5 | 20.1 | 27.6 |
| 0.681241 | 135.5 | 98.9 | 13.9 | 5.4 | 20.1 | |
| 0.283301 | 86.5 | 126.1 | 32.9 | 23.7 | 11.0 | 37.7 |
| −0.11464 | 105.3 | 108.9 | 70.7 | 46.7 | 40.7 | |
| −0.51258 | 121.9 | 114.1 | 89.3 | 81.5 | 70.0 | 97.1 |
| −0.91052 | 112.7 | 137.8 | 124.2 | 113.7 | 81.7 | 114.1 |
| −1.30846 | 116.0 | 110.1 | 134.7 | 80.5 | 81.0 | 72.6 |
| −1.7064 | 120.5 | 106.7 | 105.7 | 140.0 | 82.5 | 77.1 |
| −2.10434 | 120.5 | 108.0 | 131.0 | 95.2 | 98.4 | 88.2 |
| −2.50228 | 94.8 | 99.6 | 89.2 | 85.4 | 106.7 | 89.7 |

TABLE 102B
Tm of oligonucleotides.

| | | Duplex | Duplex | Δ difference |
|---|---|---|---|---|
| | | Tm(° C.) | Tm(° C.) | Full match |
| | | WV-12420 | WV-12421 Two | vs two |
| ASO | Length | Full match | mismatches | mismatches |
| WV-7805 | 20-mer | 63.52 | 47.62 | 15.9 |
| WV-9891 | 20-mer | 61.62 | 44.77 | 16.9 |
| WV-9890 | 20-mer | 61.57 | 46.67 | 14.9 |
| WV-9893 | 20-mer | 58.67 | 43.52 | 15.2 |
| WV-12106 | 24-mer | 71.52 | 59.72 | 11.8 |
| WV-12107 | 24-mer | 69.57 | 57.77 | 11.8 |
| WV-12100 | 24-mer | 70.77 | 59.57 | 11.2 |
| WV-12101 | 24-mer | 67.52 | 56.62 | 10.9 |

The Tm of various oligonucleotides was measured while in duplex with a RNA which was completely complementary, or which was completely complementary except for two mismatches (representing the mutant allele). Conditions used were: 1 μM Duplex in 1×PBS (pH 7.2); Temperature Range: 15° C.-90° C.; Temperature Rate: 0.5° C./min; Measurement Interval: 0.5° C.

TABLE 103
Activity of oligonucleotides.
Huh7 cells.

| Conc. (nM) | 1 | 0.52288 | 0.04576 | −0.4314 | −0.9085 | −1.3856 | −1.8627 |
|---|---|---|---|---|---|---|---|
| WV-7805 | 7.0 | 23.5 | 64.7 | 80.4 | 88.2 | 92.5 | 99.5 |
| | 5.1 | 24.7 | 78.9 | 74.1 | 86.7 | | |
| WV-9890 | 1.6 | 35.0 | | 90.4 | 90.3 | 92.6 | 104.6 |
| | 13.1 | 29.2 | 73.7 | 88.5 | 87.1 | 95.8 | 105.5 |
| WV-12100 | 12.4 | 33.8 | 63.6 | 90.6 | | 102.3 | 101.5 |
| | 10.2 | 27.6 | 76.6 | 80.0 | 83.6 | 80.7 | 85.0 |
| WV-9893 | 10.4 | 28.7 | 74.3 | 86.3 | 87.7 | 116.1 | 93.8 |
| | 4.3 | 36.4 | 80.4 | 91.5 | 110.3 | 108.6 | 106.5 |
| WV-12101 | | 4.6 | 19.8 | 60.3 | 85.8 | 92.0 | 108.3 |
| | | 6.8 | 19.2 | 60.0 | 81.1 | 81.0 | 85.6 |

TABLE 104
Activity of oligonucleotides.
nM

| Conc. (nM) | 50 | 20 | 8 | 3.2 | 1.28 | 0.51 | 0.20 | 0.081 | 0.032 | 0.013 |
|---|---|---|---|---|---|---|---|---|---|---|
| WV-7850 | 39.0 | 65.8 | 93.0 | 91.3 | 111.1 | 106.1 | 84.6 | 97.3 | 88.8 | 92.0 |
| Hep3B | 43.1 | 72.5 | 82.9 | 86.6 | 94.4 | 87.3 | 87.7 | 89.1 | 89.1 | 92.5 |
| WV-7851 | 38.2 | 81.0 | 93.6 | 90.5 | 98.6 | 94.6 | 100.1 | 90.2 | 96.1 | 100.6 |
| Hep3B | 54.3 | 84.1 | 96.1 | 94.4 | 93.0 | 94.1 | 99.5 | 87.1 | 101.9 | 92.8 |
| WV-7852 | 34.9 | 69.7 | 89.5 | 97.3 | 90.0 | 96.8 | 111.5 | 92.1 | 96.1 | 98.9 |
| Hep3B | 44.6 | 74.9 | 101.3 | 91.8 | 111.3 | 95.8 | 99.8 | 100.6 | 95.8 | 109.5 |
| WV-7853 | 28.3 | 66.4 | 85.2 | | 96.3 | 109.2 | 95.1 | 95.9 | 95.6 | 99.1 |
| Hep3B | 29.8 | 50.5 | 81.3 | 96.1 | 97.1 | 105.3 | 94.0 | 104.8 | 95.8 | 97.4 |
| WV-7854 | 16.7 | 63.0 | 82.3 | 92.8 | 90.6 | 88.3 | 89.7 | 95.2 | 99.4 | 88.0 |
| Hep3B | 18.8 | 59.9 | 80.7 | 89.4 | 84.0 | 86.6 | 88.9 | 89.4 | 94.3 | 96.5 |
| WV-7850 | 2.7 | 5.3 | 11.7 | 25.1 | 57.3 | 75.2 | 71.2 | 84.7 | 80.7 | 96.8 |
| Huh7 | 4.3 | 5.9 | 9.7 | 13.8 | 62.5 | 73.3 | 74.3 | 75.8 | 93.7 | 104.2 |
| WV-7851 | 2.1 | 6.1 | 1.1 | 31.5 | 55.2 | 81.7 | 91.8 | 91.0 | 84.3 | 86.9 |
| Huh7 | 1.3 | 4.6 | 14.9 | 25.9 | 52.3 | 81.7 | 95.0 | 79.6 | 79.5 | 81.4 |
| WV-7852 | 8.4 | 7.8 | 10.0 | 28.6 | 50.0 | 72.8 | 82.6 | 96.2 | 72.2 | 94.1 |
| Huh7 | 7.4 | 5.8 | 10.6 | 25.4 | 56.1 | 87.6 | 85.1 | 83.7 | 70.1 | 88.5 |
| WV-7853 | 2.9 | 5.4 | 6.4 | 27.1 | 47.8 | 70.1 | 96.0 | 82.7 | 89.4 | 86.3 |
| Huh7 | 3.8 | 4.3 | 8.5 | 23.8 | 62.2 | 93.8 | 74.6 | 90.4 | 93.4 | 95.8 |
| WV-7854 | 0.6 | 2.4 | 9.9 | 23.5 | 47.7 | 76.6 | 84.1 | 79.3 | 89.4 | 98.8 |
| Huh7 | 5.4 | 7.5 | 10.3 | 22.2 | 45.9 | 66.5 | 72.7 | 82.7 | 83.7 | 96.6 |

TABLE 105
Activity of oligonucleotides.

| nM | 50 | 20 | 8 | 3.2 | 1.28 | 0.51 | 0.204 | 0.081 | 0.032 | 0.013 |
|---|---|---|---|---|---|---|---|---|---|---|
| WV-7827 | 37.0 | 79.1 | 97.3 | 94.2 | 97.0 | 105.3 | 107.2 | 100.9 | 98.8 | 96.8 |
| Hep3B | 34.3 | 85.1 | 89.9 | 89.1 | 95.4 | 93.1 | 97.4 | 101.7 | 95.8 | 93.4 |
| WV-7828 | 37.0 | 85.9 | 93.5 | 97.6 | 94.2 | 97.3 | 92.0 | 94.4 | 92.8 | 92.9 |
| Hep3B | 32.8 | 77.2 | 91.8 | 90.6 | 88.8 | 96.7 | 91.7 | 89.0 | 92.8 | 90.3 |
| WV-7829 | 25.1 | 82.2 | 99.7 | 92.6 | 93.6 | 95.8 | 103.8 | 94.0 | 91.5 | 86.3 |
| Hep3B | 33.5 | 79.8 | 98.8 | 92.4 | 94.1 | 104.0 | 102.3 | 105.6 | 103.1 | 104.3 |
| WV-7830 | 36.8 | 79.3 | 97.9 | | 100.2 | 107.3 | 104.6 | 95.0 | 97.7 | 96.7 |
| Hep3B | 54.2 | 87.6 | 97.8 | 104.6 | 113.1 | 109.9 | 100.8 | 110.1 | 93.5 | 98.6 |
| WV-7831 | 53.4 | 97.4 | 103.9 | 104.8 | 99.8 | 102.6 | 111.8 | 102.0 | 93.5 | 101.5 |
| Hep3B | 62.5 | 92.9 | 103.7 | 99.5 | 102.9 | 99.8 | 98.9 | 93.6 | 101.8 | 100.8 |
| WV-7827 | 3.8 | 6.3 | 13.5 | 34.1 | 57.9 | 80.6 | 71.9 | 74.4 | 77.6 | 77.5 |
| Huh7 | 3.0 | 5.8 | 13.4 | 44.1 | 67.2 | 87.3 | 84.7 | 76.1 | 80.6 | 74.0 |
| WV-7828 | 2.3 | 16.3 | 9.8 | 31.4 | 63.3 | 83.2 | 74.9 | 82.3 | 89.1 | 83.1 |
| Huh7 | 1.5 | 9.1 | 25.0 | 31.5 | 69.3 | 75.8 | 76.5 | 87.0 | 90.0 | 79.8 |
| WV-7829 | 5.6 | 16.4 | 31.1 | 54.2 | 78.3 | 94.1 | 87.1 | 97.4 | 108.4 | 100.6 |
| Huh7 | 7.2 | 9.3 | 18.6 | 31.5 | 65.7 | 76.0 | 90.6 | 87.5 | 81.9 | 89.0 |
| WV-7830 | 4.1 | 6.3 | 12.5 | 35.3 | 56.8 | 86.4 | 80.1 | 95.7 | 86.7 | 94.2 |
| Huh7 | 5.5 | 5.9 | 17.0 | 40.2 | 76.3 | 77.5 | 79.8 | 98.6 | 93.2 | 85.8 |
| WV-7831 | 3.5 | 5.6 | 15.2 | 35.0 | 73.6 | 83.9 | 85.0 | 82.3 | 85.9 | 81.8 |
| Huh7 | 5.5 | 10.2 | 24.0 | 40.3 | 74.0 | 88.1 | 87.0 | 111.8 | 85.8 | 93.3 |

TABLE 106
Activity of oligonucleotides.

| nM | 50 | 20 | 8 | 3.2 | 1.28 | 0.51 | 0.204 | 0.081 | 0.032 | 0.013 |
|---|---|---|---|---|---|---|---|---|---|---|
| WV-7804 | 63.3 | 84.6 | 101.1 | 92.9 | 95.5 | 96.2 | 92.0 | 97.6 | 98.4 | 96.7 |
| Hep3B | 69.5 | 98.4 | 102.9 | 95.1 | 98.6 | 110.4 | 99.5 | 93.6 | 101.4 | 100.4 |
| WV-7805 | 60.3 | 81.8 | 96.9 | 90.7 | 91.3 | 95.5 | 90.5 | 92.2 | 98.5 | 95.0 |
| Hep3B | 62.7 | 86.1 | 98.5 | 98.1 | 97.0 | 97.9 | 100.7 | 107.6 | 104.0 | 105.8 |
| WV-7806 | 69.6 | 90.1 | 100.8 | 98.9 | 95.9 | 95.9 | 99.3 | 92.3 | 99.6 | 90.1 |
| Hep3B | 65.1 | 89.4 | 94.7 | 92.1 | 90.9 | 94.8 | 94.7 | 93.8 | 90.1 | 97.5 |
| WV-7807 | 75.0 | 95.3 | 101.2 | | 97.3 | 100.9 | 96.4 | 93.4 | 89.2 | 90.6 |
| Hep3B | 75.5 | 95.4 | 95.5 | 88.8 | 103.6 | 92.7 | 99.8 | 103.7 | 93.3 | 87.5 |
| WV-7808 | 72.2 | 98.9 | 117.8 | 109.5 | 116.3 | 110.9 | 109.3 | 116.8 | 111.1 | 104.6 |
| Hep3B | | | | | | | | | | |
| WV-7804 | 4.4 | 3.5 | 25.1 | 45.3 | 68.9 | 74.6 | 73.6 | 82.9 | 81.8 | 86.7 |
| Huh7 | 7.5 | 11.1 | 23.3 | 48.0 | 77.1 | 76.0 | 86.5 | 89.4 | 96.1 | 90.4 |
| WV-7805 | 1.7 | 7.1 | 19.6 | 36.1 | 59.2 | 75.3 | 69.8 | 75.0 | 78.0 | 79.6 |
| Huh7 | 8.4 | 11.9 | 11.6 | 38.4 | 76.2 | 78.4 | 81.1 | 86.9 | 95.8 | 95.0 |
| WV-7806 | 9.8 | 2.8 | 13.8 | 28.8 | 68.7 | 66.6 | 69.7 | 78.6 | 89.4 | 88.6 |
| Huh7 | 3.8 | 7.2 | 12.5 | 39.7 | 68.5 | 82.4 | 80.3 | 79.7 | 87.3 | 98.0 |
| WV-7807 | 3.0 | 12.6 | 25.1 | 46.9 | 78.0 | 85.3 | 98.8 | 92.6 | 85.6 | 85.5 |
| Huh7 | 3.9 | 9.1 | 14.9 | 41.5 | 70.4 | 73.7 | 68.5 | 75.3 | 81.9 | 94.7 |
| WV-7808 | 1.8 | 1.9 | 14.2 | 37.1 | 63.6 | 71.0 | 79.2 | 88.0 | 84.1 | 95.3 |
| Huh7 | 1.4 | 5.2 | 9.1 | 33.2 | 65.2 | 77.4 | 92.3 | 71.2 | 83.5 | 78.1 |

TABLE 107
Activity of oligonucleotides.

| | | |
|---|---|---|
| nM | WV-7805 Hep3B | WV-7805 Huh7 |

| | | | | |
|---|---|---|---|---|
| 20 | 81.8 | 86.1 | 7.1 | 11.9 |
| 8 | 96.9 | 98.5 | 19.6 | 11.6 |
| 3.2 | 90.7 | 98.1 | 36.1 | 38.4 |
| 1.28 | 91.3 | 97.0 | 59.2 | 76.2 |
| 0.512 | 95.5 | 97.9 | 75.3 | 78.4 |
| 0.2048 | 90.5 | 100.7 | 69.8 | 81.1 |
| 0.08192 | 92.2 | 107.6 | 75.0 | 86.9 |
| 0.032768 | 98.5 | 104.0 | 78.0 | 95.8 |
| 0.013107 | 95.0 | 105.8 | 79.6 | 95.0 |

TABLE 108
Activity of oligonucleotides.

| | | | |
|---|---|---|---|
| nM | 2 | 8.25 | 33 |

| | | | | | | |
|---|---|---|---|---|---|---|
| Control | 1.002 | 1.082 | 1.192 | 1.105 | 1.031 | 1.038 |
| WV-1868 | 1.105 | 1.016 | 1.120 | 0.995 | 1.023 | 1.023 |
| WV-3451 | 0.962 | 0.975 | 0.484 | 0.617 | 0.218 | 0.256 |
| WV-3452 | 1.060 | 0.948 | 0.526 | 0.505 | 0.189 | 0.172 |
| WV-3453 | 0.388 | 0.487 | 0.181 | 0.197 | 0.217 | 0.156 |
| WV-3454 | 0.509 | 0.502 | 0.260 | 0.186 | 0.138 | 0.064 |
| WV-3455 | 0.613 | 0.617 | 0.342 | 0.347 | 0.197 | 0.155 |
| WV-3456 | 0.724 | 0.843 | 0.468 | 0.545 | 0.218 | 0.223 |
| WV-3457 | 0.714 | 0.776 | 0.367 | 0.362 | 0.132 | 0.096 |
| WV-3458 | 0.672 | 0.618 | 0.251 | 0.309 | 0.256 | 0.180 |
| WV-3459 | 1.184 | 1.105 | 1.097 | 1.067 | 0.820 | 0.975 |
| WV-3460 | 0.849 | 0.689 | 0.436 | 0.367 | 0.461 | 0.382 |
| WV-3461 | 0.989 | 1.243 | 0.471 | 0.600 | 0.261 | 0.198 |
| WV-3462 | 0.833 | 1.040 | 0.417 | 0.446 | 0.286 | 0.120 |
| Control | 1.002 | 1.082 | 1.192 | 1.105 | 1.031 | 1.038 |
| WV-1868 | 1.105 | 1.016 | 1.120 | 0.995 | 1.023 | 1.023 |
| WV-3437 | 1.045 | 1.067 | 0.564 | 0.501 | 0.256 | 0.181 |
| WV-3438 | 0.861 | 0.989 | 0.935 | 0.760 | 1.009 | 0.982 |
| WV-3439 | 1.009 | 1.016 | 0.770 | 0.734 | 0.576 | 0.530 |
| WV-3440 | | 1.038 | 1.060 | 0.982 | 0.729 | 0.613 |
| WV-3441 | 1.082 | 1.234 | 0.680 | 0.903 | 0.313 | 0.433 |
| WV-3442 | 1.120 | 0.935 | 0.477 | 0.643 | 0.223 | 0.347 |
| WV-3443 | 0.477 | 0.410 | 0.278 | 0.204 | 0.229 | 0.171 |
| WV-3444 | 0.714 | 0.592 | 0.350 | 0.396 | 0.234 | 0.209 |
| WV-3445 | 1.304 | 1.060 | 0.776 | 0.760 | 0.439 | 0.388 |
| WV-3446 | 0.849 | 0.729 | 0.455 | 0.430 | 0.247 | 0.235 |
| WV-3447 | 0.786 | 0.929 | 0.568 | 0.604 | 0.201 | 0.292 |
| WV-3448 | 0.776 | 0.837 | 0.458 | 0.568 | 0.218 | 0.226 |
| WV-3449 | 0.776 | 0.704 | 0.404 | 0.449 | 0.252 | 0.130 |
| WV-3450 | 1.084 | 0.851 | 1.077 | 0.839 | 0.924 | 0.905 |
| Control | 1.002 | 1.082 | 1.192 | 1.105 | 1.031 | 1.038 |
| WV-1868 | 1.105 | 1.016 | 1.120 | 0.995 | 1.023 | 1.023 |
| WV-3423 | 0.634 | 0.600 | 0.407 | 0.419 | 0.315 | 0.280 |
| WV-3424 | 0.634 | 0.754 | 0.350 | 0.445 | 0.124 | 0.286 |
| WV-3425 | 1.002 | 1.023 | 0.729 | 0.643 | 0.347 | 0.345 |
| WV-3426 | 1.023 | 0.797 | 0.487 | 0.427 | 0.364 | 0.367 |
| WV-3427 | 0.849 | 0.897 | 0.709 | 0.781 | 0.621 | 0.572 |
| WV-3428 | 1.052 | 1.089 | 0.831 | 0.922 | 0.942 | 1.002 |
| WV-3429 | 1.060 | 0.982 | 0.588 | 0.604 | 0.401 | 0.340 |
| WV-3430 | 1.074 | 1.184 | 0.935 | 0.942 | 0.505 | 0.449 |
| WV-3431 | 0.600 | 0.675 | 0.391 | 0.364 | 0.208 | 0.237 |
| WV-3432 | 0.975 | 0.955 | 0.630 | 0.639 | 0.276 | 0.326 |
| WV-3433 | 0.596 | 0.685 | 0.240 | 0.270 | 0.215 | 0.146 |
| WV-3434 | 0.885 | 0.714 | 0.261 | 0.342 | 0.206 | 0.193 |
| WV-3435 | 0.584 | 0.584 | 0.350 | 0.311 | 0.288 | 0.261 |
| WV-3436 | 1.074 | 0.797 | 0.760 | 0.661 | 0.515 | 0.477 |
| Control | 0.910 | 1.000 | 0.996 | 1.136 | 1.105 | 1.136 |
| WV-1868 | 1.278 | 1.075 | 0.936 | 1.176 | 0.809 | 0.879 |
| WV-3409 | 0.690 | 0.498 | 0.329 | 0.274 | 0.488 | 0.405 |
| WV-3410 | 0.832 | 0.936 | 0.217 | 0.231 | 0.241 | 0.134 |
| WV-3411 | 0.685 | 0.588 | 0.114 | 0.116 | 0.037 | 0.108 |
| WV-3412 | | 0.873 | 0.383 | 0.286 | 0.089 | 0.070 |
| WV-3413 | 0.855 | 0.838 | 0.336 | 0.263 | 0.030 | 0.071 |
| WV-3414 | 1.105 | 1.024 | 0.798 | 0.709 | 0.290 | 0.333 |
| WV-3415 | 1.024 | | 0.298 | 0.185 | 0.484 | 0.393 |
| WV-3416 | 0.541 | 0.568 | 0.273 | 0.260 | 0.246 | 0.241 |
| WV-3417 | 0.734 | 0.622 | 0.331 | 0.137 | 0.298 | 0.300 |
| WV-3418 | 0.530 | 0.568 | 0.185 | 0.114 | 0.258 | 0.298 |
| WV-3419 | 0.962 | 0.639 | 0.680 | 0.588 | 0.377 | 0.362 |
| WV-3420 | | 1.113 | 0.956 | 0.771 | 0.375 | 0.159 |
| WV-3421 | 0.502 | 0.443 | 0.169 | 0.148 | 0.218 | 0.228 |
| WV-3422 | 0.923 | 1.083 | 0.680 | 0.516 | 0.365 | 0.372 |
| Control | 0.910 | 1.000 | 0.996 | 1.136 | 1.105 | 1.136 |
| WV-1868 | 1.278 | 1.075 | 0.936 | 1.176 | 0.809 | 0.879 |
| WV-3395 | 0.419 | 0.247 | 0.336 | 0.198 | 0.338 | 0.331 |
| WV-3396 | 1.024 | 0.982 | 0.452 | 0.553 | 0.249 | 0.195 |
| WV-3397 | 0.685 | 0.976 | 0.365 | | 0.182 | 0.096 |
| WV-3398 | 1.053 | | 0.159 | 0.273 | 0.061 | 0.052 |
| WV-3399 | 0.357 | 0.440 | 0.284 | 0.141 | 0.221 | 0.282 |
| WV-3400 | 0.867 | 0.861 | 0.553 | 0.458 | 0.184 | 0.160 |
| WV-3401 | 1.252 | 0.904 | 0.481 | 0.383 | 0.133 | 0.093 |
| WV-3402 | 0.437 | 0.302 | 0.122 | 0.096 | 0.070 | 0.046 |
| WV-3403 | 1.176 | 1.218 | 1.003 | 1.144 | 0.879 | 0.929 |
| WV-3404 | 0.195 | 0.367 | 0.155 | 0.135 | 0.269 | 0.215 |
| WV-3405 | 1.024 | 0.695 | 0.377 | 0.258 | 0.194 | 0.208 |
| WV-3406 | 1.287 | 1.075 | 1.314 | 1.201 | 1.314 | 0.969 |
| WV-3407 | 0.949 | 0.917 | 0.609 | 0.498 | 0.326 | 0.125 |
| WV-3408 | 0.239 | 0.360 | 0.107 | 0.187 | 0.265 | 0.161 |
| Control | 0.910 | 1.000 | 0.996 | 1.136 | 1.105 | 1.136 |
| WV-1868 | 1.278 | 1.075 | 0.936 | 1.176 | 0.809 | 0.879 |
| WV-3381 | 0.560 | 0.391 | 0.103 | 0.108 | 0.146 | 0.199 |
| WV-3382 | 0.949 | 1.024 | 0.393 | 0.271 | 0.132 | 0.211 |
| WV-3383 | 1.031 | 0.996 | 0.617 | 0.458 | 0.455 | 0.133 |
| WV-3384 | 1.252 | 1.060 | 0.402 | 0.416 | 0.136 | 0.133 |
| WV-3385 | 0.962 | 1.098 | 0.407 | 0.410 | 0.221 | 0.123 |
| WV-3386 | 0.680 | 0.440 | 0.186 | 0.246 | 0.265 | 0.176 |
| WV-3387 | 0.269 | 0.191 | 0.100 | 0.067 | 0.081 | 0.141 |
| WV-3388 | 1.168 | 0.982 | 0.849 | 1.053 | 1.168 | 0.892 |
| WV-3389 | 1.083 | 1.031 | 1.399 | 0.879 | 0.771 | 0.804 |
| WV-3390 | 0.676 | 0.580 | 0.226 | 0.265 | 0.035 | 0.051 |
| WV-3391 | 0.505 | 0.396 | 0.187 | 0.153 | 0.107 | 0.176 |
| WV-3392 | 0.462 | 0.362 | 0.139 | 0.116 | 0.093 | 0.070 |
| WV-3393 | 0.273 | 0.391 | 0.102 | 0.111 | 0.060 | 0.044 |
| WV-3394 | 0.509 | 0.405 | 0.263 | 0.133 | 0.109 | 0.097 |

In some tests of PNPLA3 oligonucleotides, APOC3 oligonucleotide WV-1868 (which targets APOC3, a gene different than PNPLA2) is used as a negative control.

TABLE 109A
Activity of oligonucleotides.

| Conc (nM) | 20 | 8 | 3.2 | 1.28 | 0.512 | 0.205 | 0.0819 | 0.0328 | 0.0131 | 0.0052 |
|---|---|---|---|---|---|---|---|---|---|---|
| WV-8148 | 111.7 | 111.5 | 102.6 | 105.8 | 102.9 | 103.1 | 92 | 96.5 | 99.6 | 118.7 |
| Hep3B | 97.3 | 114.3 | 107.8 | 106.6 | 105.8 | 106.6 | 90.9 | 100.8 | 95.3 | 105.5 |
| WV-8149 | 128.4 | 118 | 104.2 | 99.8 | 104.8 | 103.2 | 97.1 | 102.1 | 104.6 | 96.5 |
| Hep3B | 135.8 | 131.3 | 108.8 | 108.5 | 94.5 | 106.1 | 107.8 | 99.3 | 103.3 | 102.4 |
| WV-8150 | 120.7 | 123.7 | 115 | 99.8 | 98.6 | 100.9 | 88.5 | 92.3 | 103.1 | 102 |
| Hep3B | 113 | 111.8 | 98.4 | 102.1 | 102.3 | 100 | 103 | 100.8 | 104 | 107.9 |
| WV-8151 | 112.3 | 147 | 108.4 | 103.4 | 104.6 | 104.6 | 111.1 | 100.1 | 102.4 | 100 |
| Hep3B | 119.6 | 124.3 | 106.6 | 101.6 | 110.1 | 104.1 | 113.7 | 100.3 | 100.3 | 104.7 |
| WV-8152 | 119.1 | 139.2 | 113 | 107 | 112.7 | 121 | 112.4 | 111.7 | 88.5 | 114.7 |
| Hep3B | 133.7 | 149 | 118.1 | 103.2 | 101.7 | 101.8 | 102.5 | 94.6 | 98.3 | 104.2 |
| WV-8148 | 26.6 | 41.6 | 64.4 | 90.6 | 91.8 | 86.5 | 98.2 | 90.5 | 99.6 | 94.1 |
| Huh7 | 35.5 | 54 | 65.7 | 87.4 | 85.8 | 87.5 | 86.8 | 100.9 | 99.3 | 90.2 |
| WV-8149 | 23.2 | 33.1 | 64.6 | 83.6 | 87.2 | 94.4 | 82.9 | 94.8 | 79.1 | 92.5 |
| Huh7 | 27.5 | 44.3 | 65.5 | 89.5 | 84.5 | 87.9 | 82.9 | 92 | 94.6 | 85.1 |
| WV-8150 | 26.3 | 26.6 | 55 | 80.4 | 86.7 | 91.5 | 86.9 | 90.1 | 88.4 | 84.7 |
| Huh7 | 20 | 29.6 | 52.7 | 92.1 | 83.4 | 91.9 | 97 | 84 | 86.9 | 93.5 |
| WV-8151 | 13.4 | 28.7 | 59.7 | 82 | 90.6 | 92.4 | 90.2 | 84.4 | 78.1 | 85.7 |
| Huh7 | 23.6 | 32.8 | 63.6 | 77.7 | 101.1 | 92.6 | 91.6 | 100.9 | 83.4 | 90.2 |
| WV-8152 | 13.2 | 36.7 | 58.3 | 90.9 | 94.4 | 95.7 | 76.1 | 84.3 | 90.3 | 85.2 |
| Huh7 | 18.1 | 47.5 | 61 | 84.7 | 93.9 | 86.2 | 96 | 92.6 | 84 | 90.1 |

| nM | 20 | 8 | 3.2 | 1.28 | 0.512 | 0.205 | 0.0819 | 0.0328 | 0.0131 | 0.0052 |
|---|---|---|---|---|---|---|---|---|---|---|
| WV-8194 | 102.9 | 103.8 | 85.5 | 90.8 | 90.8 | 102.3 | 96.8 | 101.1 | 95.8 | 95.5 |
| Hep3B | 93.3 | 95.7 | 87.8 | 90 | 78.5 | 77.4 | 86.4 | 78.1 | 81 | 88.2 |
| WV-8195 | 107.9 | 103.7 | 96.6 | 91.5 | 91.7 | 92.1 | 94.1 | 105.6 | 107.4 | 95.7 |
| Hep3B | 123 | 101.5 | 92.9 | 89.4 | 92 | 86 | 88.3 | 101.9 | 104.3 | 99.3 |
| WV-8196 | 86.5 | 108.1 | 106 | 90.1 | 96.1 | 87.3 | 93.3 | 87.9 | 100.1 | 103.5 |
| Hep3B | 112.8 | 126.8 | 98.2 | 86.9 | 83.2 | 82.4 | 88.8 | 95.5 | 92.8 | 101.9 |
| WV-8197 | 140.8 | 123.5 | 108.9 | 87 | 91.5 | 92.8 | 106.1 | 98.1 | 107.7 | 94.5 |
| Hep3B | 143.8 | 132.1 | 98.1 | 85.6 | 85.3 | 80.7 | 84.6 | 88 | 95.2 | 93.5 |
| WV-8198 | 99.5 | 101 | 89.4 | 85.4 | 88.6 | 94.9 | 88.4 | 95.8 | 95 | 97.2 |
| Hep3B | 119.8 | 90.9 | 85.3 | 95.8 | 93.3 | 80.1 | 82.9 | 82.4 | 86.9 | 88 |
| WV-8194 | 8.1 | 13.3 | 32.2 | 69.5 | 91.6 | 100.4 | 89.2 | 91.8 | 90.4 | 81.5 |
| Huh7 | 7.4 | 31.2 | 38 | 76 | 86.9 | 93.6 | 92.5 | 92 | 87.5 | 104.3 |
| WV-8195 | 7.3 | 27 | 41.1 | 64.1 | 83.2 | 96.5 | 95.1 | 84.7 | 89.8 | 87.3 |
| Huh7 | 14 | 20 | 37.1 | 57.8 | 95 | 94.3 | 85.4 | 90.7 | 97.6 | 85.8 |
| WV-8196 | 8.9 | 19.5 | 26.7 | 64.4 | 78.5 | 88.3 | 83.2 | 88.1 | 81.1 | 81.1 |
| Huh7 | 14.3 | 19.9 | 37.1 | 57.3 | 91.7 | 91.8 | 88.5 | 84.5 | 84 | 91.9 |
| WV-8197 | 4.1 | 27.3 | 40.8 | 65.6 | 88.8 | 91.7 | 95.6 | 96 | 90.6 | 93.3 |
| Huh7 | 14.8 | 26.8 | 44 | 62.4 | 83.9 | 96.5 | 89.1 | 97.9 | 92.9 | 81.8 |
| WV-8198 | 7.9 | 19.9 | 36.5 | 68.6 | 94.6 | 90.6 | 90 | 94 | 90.9 | 89.9 |
| Huh7 | 6.9 | 26.7 | 47.9 | 63.8 | 83.1 | 99.5 | 97.2 | 97.1 | 88.1 | 97.8 |

| Conc (nM) | 20 | 8 | 3.2 | 1.28 | 0.512 | 0.205 | 0.0819 | 0.0328 | 0.0131 | 0.0052 |
|---|---|---|---|---|---|---|---|---|---|---|
| WV-8171 | 102.4 | 98.1 | 108.8 | 104.7 | 111.4 | 107.4 | 102.2 | 112 | 95.9 | 92.4 |
| Hep3B | 94.9 | 94.6 | 89.8 | 102.6 | 97.2 | 101.8 | 96.4 | 98.9 | 97.7 | 90.6 |
| WV-8172 | 105 | 105.3 | 116.3 | 108.9 | 120 | 105.5 | 101.4 | 100.9 | 94.3 | 99.9 |
| Hep3B | 92.8 | 90.5 | 92.7 | 90.1 | 96.8 | 90.6 | 97.9 | 92.5 | 96.7 | 84.7 |
| WV-8173 | 96.9 | 90.2 | 99.1 | 108.6 | 107.1 | 103.6 | 105.9 | 100.6 | 95.6 | 100.2 |
| Hep3B | 104.3 | 96.4 | 99 | 98.2 | 99.9 | 103.3 | 95.7 | 96.4 | 97.7 | 95.1 |
| WV-8174 | 98 | 85.2 | 93.3 | 96.1 | 83.8 | 84.7 | 83 | 86.3 | 93.7 | 105.9 |
| Hep3B | 115.5 | 112.5 | 95.7 | 98.7 | 86.6 | 97.4 | 93.6 | 82.7 | 90.4 | 99.2 |
| WV-8175 | 98.2 | 91 | 90.6 | 88 | 95.9 | 94.2 | 86.7 | 96 | 106.2 | 91.3 |
| Hep3B | 102.6 | 91.1 | 89.4 | 87.1 | 93.7 | 98.8 | 102.7 | 83.9 | 95.7 | 88.1 |
| WV-8171 | 22.1 | 39.4 | 56.7 | 76.8 | 76 | 87.5 | 75.8 | 95.2 | 83.1 | 77.8 |
| Huh7 | 19.2 | 58.8 | 66.5 | 77.9 | 89.6 | 88.9 | 93.8 | 91 | 90.8 | 97.2 |
| WV-8172 | 13.9 | 30 | 54.5 | 80.4 | 88.1 | 87.6 | 79.8 | 85.4 | 82 | 98.4 |
| Huh7 | 20.6 | 43.1 | 54.6 | 78.4 | 89.4 | 92.4 | 93.6 | 99.8 | 109.4 | 105.5 |
| WV-8173 | 37.2 | 44.1 | 78.6 | 106.3 | 113.7 | 106.6 | 105.3 | 103.7 | 97.6 | 93.3 |
| Huh7 | 41 | 75.8 | 85.6 | 100.6 | 111.3 | 103.2 | 114.4 | 117.5 | 107.3 | 107.7 |
| WV-8174 | 30.2 | 47.6 | 66.3 | 69.3 | 92.1 | 85.6 | 85.6 | 76.1 | 87.3 | 89.8 |
| Huh7 | 19 | 40.9 | 52.4 | 77.2 | 92.2 | 96.6 | 88.8 | 92 | 92.1 | 91.8 |
| WV-8175 | 11.5 | 26.5 | 45.9 | 69.1 | 86.1 | 85.6 | 82.6 | 92.9 | 97 | 83.7 |
| Huh7 | 12.5 | 26.7 | 45.2 | 77.6 | 86.4 | 94.5 | 102.9 | 91.7 | 92 | 85.9 |
| nM | 20 | 8 | 3.2 | 1.28 | 0.512 | 0.205 | 0.0819 | 0.0328 | 0.0131 | 0.0052 |
| WV-8217 | 88.4 | 85.5 | 87.5 | 86.9 | 89.2 | 90 | 98.6 | 98.5 | 97.1 | 86.5 |
| Hep3B | 93.3 | 83.5 | 76.7 | 80.1 | 78 | 77.9 | 77.6 | 74.8 | 79.8 | 86.6 |
| WV-8218 | 100.6 | 94.9 | 92 | 93.1 | 99.6 | 96 | 98.2 | 95.5 | 92.9 | 87.4 |
| Hep3B | 99.3 | 96.4 | 99.2 | 96.3 | 95.5 | 100.8 | 100.5 | 93.6 | 96.7 | 96.3 |
| WV-8219 | 147.3 | 128.9 | 107.6 | 106.1 | 104.8 | 106.8 | 98.6 | 101.5 | 96.5 | 110.7 |
| Hep3B | 126.8 | 103.2 | 94.8 | 93.5 | 94.2 | 96 | 100.6 | 103.3 | 96.7 | 102.9 |
| WV-8220 | 104.2 | 115.4 | 103.9 | 97 | 106.9 | 102.2 | 99.4 | 105.1 | 99.1 | 95.3 |
| Hep3B | 100 | 89.8 | 96.8 | 95.5 | 107.4 | 106.4 | 104.3 | 95.9 | 117 | 101 |
| WV- | 110.2 | 104.7 | 97.7 | 102.6 | 104.1 | 106.4 | 102.6 | 100.3 | 102 | 98.4 |
| 8221Hep3B | 94.5 | 98.5 | 101.6 | 99.7 | 99.4 | 108.4 | 103 | 107.1 | 100.3 | 103.3 |
| WV-8217 | 26.8 | 37.9 | 58.2 | 81.9 | 94 | 101.3 | 112 | 105.2 | 97.8 | 28.2 |
| Huh7 | 27.7 | 41 | 57.6 | 90.7 | 109.2 | 102.4 | 110.5 | 109.9 | 105.5 | 105.2 |
| WV-8218 | 21.6 | 45.8 | 56.1 | 77.7 | 86.9 | 97.3 | 82.6 | 88.5 | 86.1 | 73.9 |
| Huh7 | 20.9 | 28.8 | 55.3 | 78.1 | 106.9 | 107.3 | 107.6 | 95.6 | 104.1 | 82.8 |
| WV-8219 | 31.5 | 31 | 42.7 | 62.7 | 92 | 91.7 | 85.7 | 75.7 | 77.2 | 85.7 |
| Huh7 | 26 | 31.8 | 47.9 | 75 | 85.5 | 92.1 | 83.6 | 89.7 | 93.1 | 91.3 |
| WV-8220 | 4.8 | 16.3 | 31.8 | 66.1 | 78.6 | 77.8 | 79.7 | 71.7 | 81.1 | 80.3 |
| Huh7 | 11.8 | 30.1 | 54.4 | 77.4 | 105.6 | 98.6 | 90.5 | 85.7 | 93.9 | 85.5 |
| WV-8221 | 6.2 | 21.4 | 31.8 | 48.6 | 78.3 | 85.8 | 75.5 | 83.8 | 85.3 | 93 |
| Huh7 | 4.6 | 19.1 | 35.2 | 59.6 | 104.8 | 105.8 | 99.2 | 100.1 | 93.2 | 88.7 |

TABLE 109B
Activity of oligonucleotides.
IC50 in Huh7 cells (mutant allele):

| Oligonucleotide | IC50 (nM) | Oligonucleotide | IC50 (nM) |
|---|---|---|---|
| WV-8148 | 7.3 | WV-8197 | 3.2 |
| WV-8149 | 9.2 | WV-8198 | 3.5 |
| WV-8150 | 5.5 | WV-8217 | 5.4 |
| WV-8151 | 7.9 | WV-8218 | 5.9 |
| WV-8152 | 12.6 | WV-8219 | 3.1 |
| WV-8171 | 11.2 | WV-8220 | 5.5 |
| WV-8172 | 5.2 | WV-8221 | 2.6 |
| WV-8173 | 12 | WV-8194 | 3.5 |
| WV-8174 | 6.6 | WV-8195 | 3 |
| WV-8175 | 4.2 | WV-8196 | 2.8 |

TABLE 110
Activity of oligonucleotides.
Huh7 cells:

| | 50 | 20 | 8 | 3.2 | 1.28 | 0.512 | 0.204 | 0.081 | 0.032 | 0.013 |
|---|---|---|---|---|---|---|---|---|---|---|
| WV-3861 | 23.1 | 43.8 | 72.8 | 101.4 | 102.4 | 103.3 | 85.5 | 91.9 | 93.7 | 92.0 |
| | 30.1 | 52.2 | 89.3 | 103.4 | 95.9 | 93.4 | 99.4 | 104.5 | 89.7 | 104.8 |
| WV-7805 | 8.0 | 13.3 | 32.7 | 65.4 | 87.0 | 83.1 | 91.2 | 84.1 | 76.1 | 85.3 |
| | 10.1 | 22.7 | 49.1 | 82.1 | 87.8 | 81.8 | 82.5 | 77.8 | 87.9 | 79.1 |
| WV-7828 | 5.3 | 15.3 | 26.8 | 60.5 | 88.1 | 85.0 | 92.1 | 85.8 | 84.2 | 90.3 |
| | 4.3 | 10.0 | 41.1 | 54.4 | 79.6 | 90.2 | 89.0 | 90.2 | 99.3 | 83.6 |
| WV-7851 | 4.1 | 4.4 | 20.0 | 42.9 | 63.8 | 85.3 | 77.7 | 79.3 | 84.6 | 93.4 |
| | 6.7 | 6.6 | 20.3 | 47.5 | 86.7 | 79.7 | 97.4 | 97.4 | 85.0 | 89.4 |
| WV-8149 | 18.4 | 29.4 | 35.5 | 71.2 | 88.8 | 91.2 | 75.3 | 84.9 | 86.5 | 90.6 |
| | 46.2 | 21.9 | 47.2 | 80.7 | 86.5 | 93.9 | 83.9 | 90.5 | 101.4 | 95.3 |
| WV-8172 | 20.5 | 13.7 | 30.4 | 53.8 | 73.3 | 85.2 | 74.8 | 80.7 | 87.0 | 84.4 |
| | 20.3 | 21.9 | 41.3 | 59.0 | 78.7 | 83.5 | 91.1 | 92.5 | 91.8 | 104.3 |
| WV-8195 | 23.2 | 11.4 | 15.4 | 64.8 | 71.9 | 74.1 | 82.8 | 87.0 | 88.5 | 76.4 |
| | 22.7 | 14.6 | 23.5 | 62.1 | 80.2 | 85.0 | 99.0 | 99.6 | 104.0 | 100.4 |
| WV-8218 | 6.6 | 13.1 | 13.4 | 53.7 | 73.0 | 93.6 | 94.6 | 93.8 | 88.0 | 92.3 |
| | 20.2 | 14.0 | 30.6 | 57.7 | 97.4 | 117.6 | 99.8 | 101.2 | 114.2 | 109.0 |
| WV-3864 | 3.7 | 22.4 | 60.6 | 94.6 | 92.3 | 99.2 | 88.2 | 97.2 | 92.0 | 104.1 |
| | 18.9 | 27.5 | 68.5 | 114.8 | 95.1 | 113.1 | 100.1 | 117.6 | 110.2 | 118.9 |
| WV-7808 | 6.6 | 12.6 | 34.8 | 66.1 | 73.0 | 88.8 | 93.9 | 90.6 | 91.2 | 94.2 |
| | 6.4 | 14.2 | 32.3 | 80.2 | 106.0 | 106.7 | 107.6 | 89.2 | 103.4 | 97.6 |
| WV-7831 | 4.8 | 7.9 | 27.1 | 62.1 | 80.6 | 82.5 | 91.4 | 92.8 | 93.6 | 93.7 |
| | 8.0 | 13.1 | 29.4 | 62.2 | 90.7 | 122.5 | 105.5 | 120.7 | 115.5 | 97.9 |
| WV-7854 | 2.0 | 7.1 | 21.5 | 49.2 | 74.1 | 83.3 | 116.8 | 75.8 | 83.4 | 95.0 |
| | 5.0 | 5.3 | 17.0 | 50.4 | 100.7 | 99.7 | 103.2 | 99.8 | 101.7 | 90.1 |
| WV-8152 | | 14.4 | 33.7 | 80.7 | 82.8 | 80.8 | 84.3 | 86.5 | 89.7 | 88.2 |
| | | 23.4 | 40.1 | 77.3 | 106.3 | 96.3 | 97.7 | 99.9 | 97.1 | 79.5 |
| WV-8175 | 17.6 | 13.5 | 18.2 | 48.5 | 69.7 | 87.0 | 72.8 | 91.4 | 86.5 | 81.6 |
| | 22.4 | 16.5 | 19.2 | 51.1 | 108.5 | 89.7 | 87.4 | 102.0 | 91.2 | 95.4 |
| WV-8198 | 16.6 | 8.3 | 15.1 | 43.7 | 78.0 | 81.9 | 82.7 | 75.3 | 91.5 | 88.2 |
| | 7.1 | 5.1 | 23.9 | 46.3 | 93.6 | 103.2 | 103.6 | 93.8 | 125.9 | 96.0 |
| WV-8221 | 16.0 | 9.6 | 12.4 | 31.8 | 73.1 | 101.6 | 96.7 | 77.9 | 86.7 | 94.3 |
| | 13.0 | 10.9 | 16.2 | 44.1 | 85.5 | 102.0 | 110.9 | 123.8 | 101.9 | 102.9 |

TABLE 111
Activity of oligonucleotides.

| Oligonucleotide | 2 nM | Oligonucleotide | 2 nM |
|---|---|---|---|
| WV-4098 | 30 | WV-9277 | 44 |
| WV-9273 | 72 | WV-9278 | 55 |
| WV-9274 | 73 | WV-9279 | 39 |
| WV-9275 | 74 | WV-9280 | 82 |
| WV-9276 | 52 | WV-9281 | 68 |

Several PNPLA3 ssRNAi agents were also prepared and tested which have an abasic site, specifically a (phosphaneyl)oxy)propan-1-ol (PS) or 3′-(phosphaneyl)oxy)tetrahydrofuran. Results for oligonucleotide administration at 2 nM is shown, and oligonucleotides were also tested at 0, 0.05, 0.128, 0.32, and 0.8 nM (data not shown). Numbers are approximate and represent residual PNPLA3 mRNA level (PNPLA3/HPRT1), wherein 100 would represent 100% residual mRNA level (0% knockdown) and 0 would represent 0% residual mRNA level (100% knockdown). In the various tables herein, the level of mRNA is measured, unless otherwise noted.

TABLE 112
Activity of oligonucleotides.

| Oligonucleotide | 2 nM | Oligonucleotide | 2 nM |
|---|---|---|---|
| WV-4098 | 31 | WV-4098 | 31 |
| WV-9261 | 62 | WV-9272 | 81 |
| WV-9262 | 69 | WV-9284 | 75 |
| WV-9263 | 72 | | |
| WV-9264 | 62 | | |
| WV-9265 | 56 | | |
| WV-9266 | 64 | | |
| WV-9267 | 43 | | |
| WV-9268 | 69 | | |
| WV-9269 | 71 | | |

Several APOC3 ssRNAi agents were also prepared and tested which have C3 modification. Results for oligonucleotide administration at 2 nM is shown, and oligonucleotides were also tested at 0, 0.05, 0.128, 0.32, and 0.8 nM (data not shown). Numbers are approximate and represent residual PNPLA3 mRNA level (PNPLA3/HPRT1), wherein 100 would represent 100% residual mRNA level (0% knockdown) and 0 would represent 0% residual mRNA level (100% knockdown). In the various tables herein, the level of mRNA is measured, unless otherwise noted.

TABLE 113
Activity of oligonucleotides.

| Oligonucleotide | 25 nM |
|---|---|
| WV-3421 | 13 |
| WV-9434 | 63 |
| WV-9439 | 55 |
| WV-9444 | 37 |
| WV-3421 | 12 |
| WV-9435 | 62 |
| WV-9440 | 37 |
| WV-9445 | 34 |
| WV-3421 | 17 |
| WV-9431 | 92 |
| WV-9436 | 70 |
| WV-9441 | 73 |
| WV-9432 | 53 |
| WV-9437 | 36 |
| WV-9442 | 54 |
| WV-9433 | 77 |
| WV-9438 | 44 |
| WV-9443 | 69 |

Data is shown for 25 nM; oligonucleotides were also tested at 0, 1.6, and 6.2 nM (data not shown). Oligonucleotides were tested in vitro in primary cynomolgus hepatocytes.

TABLE 114
Activity of oligonucleotides.

| | Hep3b (wt) | Huh7 (mutant) |
|---|---|---|
| WV-9890 | 88 | 37 |
| WV-12100 | 103 | 27 |
| WV-9893 | 67 | 10 |
| WV-12101 | 69 | 8 |

Primary cynomolgus hepatocytes. Data is shown for 4 nM. Oligonucleotides were also tested at 0, 0.1, 0.25, 0.66, 1.6, and 10 nM (data not shown). Numbers represent residual PNPLA3 mRNA level (PNPLA3/HPRT1) and numbers are approximate.
WV-9893 and WV-12101 have an asymmetrical format.
Additional oligonucleotides which have an asymmetrical format, but which are stereorandom, were tested, which have the double mutation at P9/P12 (positions 9 and 12). WV-8609, WV-8847, WV-8848, WV-8849 all had an IC50 of around 4 to 5 nM.

TABLE 115A
Activity of oligonucleotides.

| | |
|---|---|
| WV-7805 | 58 |
| WV-8603 | 46 |
| WV-8608 | 73 |
| WV-9889 | 69 |
| WV-9890 | 76 |
| WV-8609 | 26 |
| WV-8601 | 61 |
| WV-8605 | 65 |
| WV-8606 | 105 |
| WV-9891 | 43 |
| WV-9892 | 52 |
| WV-9893 | 115 |

Several PNPLA3 oligonucleotides, some of which have an asymmetrical structure, were tested for stability in rat liver homogenate at 2 days. Numbers represent % of full-length oligonucleotide remaining; numbers are approximate.

TABLE 115B
Activity of oligonucleotides.

| Oligonucleotide | Ligand | mFX1/mHPRT1 |
|---|---|---|
| WV-3969 | Tri-GalNAc | 23 |
| WV-5287 | Tri-PFE ligand | 22 |
| WV-7299 | Bi-GalNAc | 22 |
| WV-7300 | Bi-PFE ligand | 20 |
| WV-7297 | Mono-GalNAc | 74 |
| WV-7298 | Mono-PFE ligand | 43 |

Several oligonucleotides were also prepared which target a mouse homolog of different gene, Factor XI (FXI or F11), and which comprised an additional component, which was a tri-, bi- or mono-antennary ligand which was either a GalNAc or a PFE ligand. These were administered to mice at 0.3, 1 or 3 mpK QDx3. Numbers below represent the mFXI/mHPRT1 mRNA level relative to control at 3 mpk. Mice were also administered oligonucleotides at 0.3 and 1 (nth (data not shown).

TABLE 115C
Oligonucleotides.

| Oligo- | | Naked | Stereo- | SEQ ID |
|---|---|---|---|---|
| nucleotide | Sequence | Sequence | chemistry | NO: |
| WV-7297 | Mod038L001Teo * Geo * Geo * Teo * Aeo * A | TGGTAA | OXXXXXXXXXX | 1953 |
| | * T * m5C * m5C * A * m5C * T * T * T * m5C * | TCCACTT | XXXXXXXXX | |
| | Aeo * Geo * Aeo * Geo * Geo | TCAGAGG | | |
| WV-7298 | Mod039L001Teo * Geo * Geo * Teo * Aeo * A | TGGTAA | OXXXXXXXXXX | 1954 |
| | * T * m5C * m5C * A * m5C * T * T * T * m5C * | TCCACTT | XXXXXXXXX | |
| | Aeo * Geo * Aeo * Geo * Geo | TCAGAGG | | |
| WV-7299 | Mod040L001Teo * Geo * Geo * Teo * Aeo * A | TGGTAA | OXXXXXXXXXX | 1955 |
| | * T * m5C * m5C * A * m5C * T * T * T * m5C * | TCCACTT | XXXXXXXXX | |
| | Aeo * Geo * Aeo * Geo * Geo | TCAGAGG | | |
| WV-7300 | Mod041L001Teo * Geo * Geo * Teo * Aeo * A | TGGTAA | OXXXXXXXXXX | 1956 |
| | * T * m5C * m5C * A * m5C * T * T * T * m5C * | TCCACTT | XXXXXXXXX | |
| | Aeo * Geo * Aeo * Geo * Geo | TCAGAGG | | |
| WV-5287 | Mod034L001Teo * Geo * Geo * Teo * Aeo * A | TGGTAA | OXXXXXXXXXX | 1957 |
| | * T * m5C * m5C * A * m5C * T * T * T * m5C * | TCCACTT | XXXXXXXXX | |
| | Aeo * Geo * Aeo * Geo * Geo | TCAGAGG | | |

The various components (e.g., *, Mod038, etc.) in this table are the same as those in Table 1A. All of these oligonucleotides are single-stranded, though the sequences are split into multiple lines for formatting.
Various APOC3 oligonucleotides were constructed which comprise a tri-, bis- or mono-antennary ligand which is either the PFE ligand or GalNAc. Such oligonucleotides include:

TABLE 115D
Oligonucleotides.

| Oligonucleotide | Ligand | | | |
|---|---|---|---|---|
| WV-6558 | Tri-GaINAc | | | |
| WV-9542 | Tri-PFE | | | |
| WV-9543 | Bis-GaINAc | | | |
| WV-9544 | Bis-PFE | | | |
| WV-9545 | Mono-GaINAc | | | |
| WV-9546 | Mono-PFE | | | |
| WAVE | | | Stereo- | SEQ ID |
| ID | Sequence | Naked Sequence | chemistry | NO: |
| WV- | Mod001L001Aeo * SGeom5CeoTeoTeo * RC | AGCTTCTTGTC | OSOOORSSSRS | 777 |
| 6558 | * ST * ST* SG* RT * SC * SC * RA * SG* | CAGCTTTAT | SRSSROOOS | |
| | SC * RTeoTeoTeoAeo * STeo | | | |
| WV- | Mod083L001Aeo * SGeom5CeoTeoTeo * RC | AGCTTCTTGTC | OSOOORSSSRS | 1634 |
| 9542 | * ST * ST* SG* RT * SC * SC * RA * SG* | CAGCTTTAT | SRSSROOOS | |
| | SC * RTeoTeoTeoAeo * STeo | | | |
| WV- | Mod079L001Aeo * SGeom5CeoTeoTeo * RC | AGCTTCTTGTC | OSOOORSSSRS | 1635 |
| 9543 | * ST * ST* SG* RT * SC * SC * RA * SG* | CAGCTTTAT | SRSSROOOS | |
| | SC * RTeoTeoTeoAeo * STeo | | | |
| WV- | Mod080L001Aeo * SGeom5CeoTeoTeo * RC | AGCTTCTTGTC | OSOOORSSSRS | 1636 |
| 9544 | * ST * ST* SG* RT * SC * SC * RA * SG* | CAGCTTTAT | SRSSROOOS | |
| | SC * RTeoTeoTeoAeo * STeo | | | |
| WV- | Mod081L001Aeo * SGeom5CeoTeoTeo * RC | AGCTTCTTGTC | OSOOORSSSRS | 1637 |
| 9545 | * ST * ST* SG* RT * SC * SC * RA * SG* | CAGCTTTAT | SRSSROOOS | |
| | SC * RTeoTeoTeoAeo * STeo | | | |
| WV- | Mod082L001Aeo * SGeom5CeoTeoTeo * RC | AGCTTCTTGTC | OSOOORSSSRS | 1638 |
| 9546 | * ST * ST* SG* RT * SC * SC * RA * SG* | CAGCTTTAT | SRSSROOOS | |
| | SC * RTeoTeoTeoAeo * STeo | | | |

The various components (e.g., *, Mod083, etc.) in this table are the same as those in Table 1A. All of these oligonucleotides are single-stranded, though the sequences are split into multiple lines for formatting.

TABLE 115E
Activity of oligonucleotides

| Day | 0 | 8 | 15 | 22 | 29 | 36 | 43 | 50 |
|---|---|---|---|---|---|---|---|---|
| PBS | 1.52 | 0.95 | 1.50 | 0.56 | 0.96 | 1.07 | 1.57 | 1.74 |
| | 0.59 | 0.73 | 0.74 | 0.87 | 0.90 | 0.90 | 0.73 | 0.71 |
| | 1.21 | 0.99 | 1.10 | 1.34 | 0.89 | 0.82 | 0.62 | 0.78 |
| | 0.67 | 1.14 | 0.89 | 0.99 | 0.89 | 0.86 | 0.95 | 0.86 |
| | 1.01 | 1.20 | 0.76 | 1.24 | 1.35 | 1.36 | 1.13 | 0.91 |
| WV-8877 | 1.56 | 1.24 | 1.67 | 1.59 | 2.37 | 1.56 | 1.47 | 2.27 |
| | 0.78 | 0.73 | 0.85 | 0.80 | 1.15 | 0.61 | 0.75 | 1.19 |
| | 1.08 | 0.81 | 1.42 | | 1.84 | 1.21 | 1.73 | 3.05 |
| | 0.71 | 1.21 | 0.74 | 0.62 | 1.02 | 1.07 | 0.95 | 1.48 |
| | 1.28 | 1.21 | 0.60 | 0.80 | 1.13 | 1.50 | 0.86 | |
| WV-6558 | 2.74 | 0.06 | 0.05 | 0.06 | 0.11 | 0.38 | 0.69 | 1.43 |
| | 1.15 | 0.17 | 0.05 | 0.04 | 0.09 | 0.27 | 0.01 | 0.81 |
| | 0.38 | 0.04 | 0.05 | 0.10 | 0.18 | 0.45 | 0.53 | 1.07 |
| | 0.44 | | | | | | | |
| | 0.41 | 0.04 | 0.04 | 0.08 | 0.09 | 0.11 | 0.13 | 0.22 |
| WV-9542 | 1.10 | 0.23 | 0.05 | 0.07 | 0.13 | 0.23 | 0.32 | 0.78 |
| | 0.71 | 0.03 | 0.02 | 0.04 | 0.06 | 0.09 | 0.20 | 0.28 |
| | 0.59 | 0.05 | 0.04 | 0.08 | 0.16 | 0.72 | 0.90 | 0.80 |
| | 0.32 | 0.03 | 0.02 | 0.04 | 0.09 | 0.37 | 0.54 | 0.55 |
| | 0.40 | 0.03 | 0.03 | 0.06 | 0.21 | 0.39 | 0.49 | 0.58 |
| WV-9543 | 0.48 | 0.03 | 0.05 | 0.09 | 0.08 | 0.21 | 0.27 | 0.49 |
| | 1.19 | 0.06 | 0.06 | 0.09 | 0.06 | 0.09 | 0.57 | 0.96 |
| | 0.79 | 0.05 | 0.04 | 0.17 | 0.06 | 0.15 | 0.42 | 0.80 |
| | 0.79 | 0.09 | 0.03 | 0.28 | 0.20 | 0.17 | 0.28 | 0.59 |
| | 0.48 | 0.04 | 0.02 | 0.08 | 0.06 | 0.12 | 0.17 | 0.32 |
| WV-9544 | 0.91 | | 0.04 | 0.06 | 0.06 | 0.19 | 0.26 | 0.67 |
| | 0.94 | 0.10 | 0.03 | 0.08 | 0.09 | 0.15 | 0.34 | 0.76 |
| | 1.72 | 0.19 | 0.04 | 0.07 | 0.09 | 0.25 | 0.60 | 0.83 |
| | 1.92 | 0.28 | 0.07 | 0.10 | 0.11 | 0.13 | 0.26 | 0.56 |
| | 0.81 | 0.04 | 0.05 | 0.11 | 0.12 | 0.20 | 0.32 | 0.73 |
| WV-9545 | 0.49 | 0.03 | 0.07 | 0.16 | 0.21 | 0.32 | 0.66 | 0.60 |
| | 1.14 | 0.22 | 0.04 | 0.10 | 0.15 | 0.58 | 0.76 | 0.97 |
| | 0.58 | 0.03 | 0.04 | 0.15 | 0.27 | 0.67 | 1.16 | 0.97 |
| | 0.64 | 0.03 | 0.04 | 0.19 | 0.42 | 0.98 | 1.38 | 0.96 |
| | 0.60 | 0.05 | 0.03 | 0.08 | | | | |
| WV-9546 | 3.33 | 0.20 | 0.06 | 0.27 | 0.24 | 0.49 | 1.13 | 1.31 |
| | 1.03 | 0.11 | 0.04 | 0.09 | 0.14 | 0.46 | 0.55 | 0.68 |
| | 1.20 | 0.28 | 0.12 | 0.20 | 0.31 | 0.95 | 1.75 | 1.39 |
| | 0.71 | 0.15 | 0.04 | 0.19 | 0.39 | 0.26 | 0.75 | 0.36 |
| | 0.18 | 0.04 | 0.02 | 0.20 | 0.28 | 0.21 | 0.56 | 0.56 |

All oligonucleotides were administered to animals at a 3 mg/kg single dose (s.c.) at day 1. In addition, WV-6558 and WV-9542 were also administered to animals at a 1 mg/kg single dose (s.c.) at day 1. Serum was collected at days 0, 8, 15, 22, 29, 36, 43, and 50. Each group contained 5 animals. PBS and WV-8877 (which targets a gene which is not APOC3) were negative controls.
Numbers indicate relative APOC3 protein level, wherein 1.00 represents 100% relative to PBS.
In various in vivo studies, including this one, tested animals were transgenic mice expressing the human APOC3 gene.

TABLE 115F
Part I. Oligonucleotide accumulation in the liver

| PBS | WV-6558 | WV-9542 | WV-9543 | WV-9544 | WV-9545 | WV-9546 |
|---|---|---|---|---|---|---|
| 0 | 2.95 | 1.73 | 3.52 | 3.82 | 2.02 | 4.27 |
| 0 | 2.46 | 1.69 | 2.49 | 4.19 | 1.99 | 1.37 |
| 0 | 2.48 | 0.45 | 1.14 | 2.74 | 1.30 | 1.29 |
| 0 | 1.85 | 1.09 | 2.12 | 2.26 | 1.14 | 1.25 |
| 0 | 1.79 | 1.43 | 4.26 | 1.88 | 1.07 | 0.82 |

Oligonucleotide accumulation in the liver was also analyzed after a single 3 mg/kg dose, 30 min. Numbers indicate pg of oligonucleotide/g of tissue. Tested animals were transgenic mice expressing the human APOC3 gene.
In the same experiment: Oligonucleotide accumulation in the liver was also analyzed for WV-6558 and WV-9542 after a single 1 mg/kg dose, 30 min. Numbers indicate pg of oligonucleotide/g of tissue.

| | WV-6558 | WV-9542 |
|---|---|---|
| PBS | 1 mpk | 1 mpk |
| 0 | 1.92 | 0.46 |
| 0 | 1.77 | 1.08 |
| 0 | 1.43 | 0.56 |
| 0 | 0.68 | 0.30 |
| 0 | 0.18 | 0.67 |

TABLE 115F
Part II. Oligonucleotide accumulation in the liver

| PBS | WV-6558 | WV-9542 | WV-9543 | WV-9544 | WV-9545 | WV-9546 |
|---|---|---|---|---|---|---|
| 0 | 3.30 | 2.93 | 6.83 | 4.56 | 3.55 | 3.83 |
| 0 | 3.49 | 2.20 | 6.56 | 4.45 | 2.23 | 4.05 |
| 0 | 3.18 | 1.34 | 4.58 | 2.72 | 1.94 | 2.28 |
| 0 | 2.41 | 1.61 | 3.87 | 2.31 | 3.03 | 2.12 |
| 0 | 1.43 | 2.90 | 4.10 | 2.36 | 1.85 | 3.50 |

Oligonucleotide accumulation in the liver was also analyzed after a single 3 mg/kg dose, 8 days. Numbers indicate ug of oligonucleotide/g of tissue. Tested animals were transgenic mice expressing the human APOC3 gene.
In the same experiment: Oligonucleotide accumulation in the liver was also analyzed for WV-6558 and WV-9542 after a single 1 mg/kg (1 mpk) dose, 8 days. Numbers indicate μg of oligonucleotide/g of tissue.

| | WV-6558 | WV-9542 |
|---|---|---|
| PBS | 1 mpk | 1 mpk |
| 0 | 0.72 | 1.08 |
| 0 | 0.74 | 1.20 |
| 0 | 0.60 | 0.75 |
| 0 | 0.55 | 0.57 |
| 0 | 0.63 | 0.63 |

The data show the efficacy of various ligands conjugated to APOC3 oligonucleotides; these same ligands can also be conjugated onto PNPLA3 oligonucleotides.
Table 116. Activity of oligonucleotides.
Various PNPLA3 RNAi agents were tested for stability in rat liver homogenate. Numbers represent percent of full-length oligonucleotide remaining at 5 days; oligonucleotides were also tested at 2 days (data not shown); and numbers are approximate. Some oligonucleotides comprise a 5′-DNA-T and some oligonucleotides comprise a 5′-Rc-Me-T.

TABLE 117
Activity of oligonucleotides.

| | |
|---|---|
| WV-8095 | 62 |
| WV-9495 | 61 |
| WV-9499 | 86 |
| WV-8701 | 49 |
| WV-9496 | 71 |
| WV-9500 | 99 |

[1815] Various PNPLA3 oligonucleotides were also tested for efficacy with an additional component which is a tri-antennary GalNAc conjugate. Oligonucleotides were tested in vitro on Huh7-148 OE cells (which comprise the mutant allele of PNPLA3) at 10 nM. Numbers represent PNPLA3 mRNA levels (PNPLA3/HPRT1), and numbers are approximate. In many cases, the oligonucleotides did not demonstrate significant knockdown of wild-type PNPLA3 in cynomolgus (non-human primate or NHP) hepatocytes. For example, WV-8132, WV-8600, WV-9868 and WV-9860 did not demonstrate significant knockdown of wild-type PNPLA3 in cynomolgus (non-human primate or NHP) hepatocytes when tested at up to 10 nM (data not shown).

TABLE 118
Activity of oligonucleotides.

| Negative control | 100 | Negative control | 100 |
|---|---|---|---|
| WV-993 | 117 | WV-993 | 117 |
| WV-7805 | 20 | WV-8600 | 47 |
| WV-8132 | 54 | WV-8564 | 47 |
| WV-8566 | 67 | WV-8596 | 62 |
| WV-8599 | 82 | WV-8597 | 38 |
| WV-9859 | 56 | | |
| WV-9670 | 57 | | |
| WV-993 | 117 | WV-993 | 117 |
| WV-9868 | 48 | WV-9860 | 65 |
| WV-9869 | 50 | WV-9861 | 58 |
| WV-9870 | 53 | WV-9862 | 62 |

Various PNPLA3 oligonucleotides were tested in vitro in cells after treatment with oligonucleotide. In this table, 100.00 would represent 100% PNPLA3 mRNA level and 0.00 would represent 0% PNPLA3 mRNA after treatment with oligonucleotides.

TABLE 119
Activity of oligonucleotides.

| Time (mins) | 0 | 5 | 10 | 15 | 20 | 30 | 45 | 60 |
|---|---|---|---|---|---|---|---|---|
| WV-7805 + WV-8807 | 100.0 | 94.1 | 93.4 | 88.6 | 90.6 | 82.8 | 74.5 | 73.4 |
| WV-8603 + WV-8807 | 100.0 | 93.1 | 89.7 | 84.4 | 91.0 | 82.4 | 73.0 | 66.4 |
| WV-8608 + WV-8807 | 100.0 | 95.4 | 92.2 | 89.8 | 87.4 | 81.4 | 79.7 | 72.1 |
| WV-9889 + WV-8807 | 100.0 | 90.9 | 87.7 | 81.9 | 85.7 | 74.4 | 72.9 | 66.4 |
| WV-9890 + WV-8807 | 100.0 | 92.7 | 89.6 | 85.4 | 88.7 | 77.0 | 75.8 | 66.8 |
| WV-7805 + WV-8808 | 100.0 | 99.5 | 97.7 | 98.1 | 96.9 | 96.2 | 95.6 | 93.4 |
| WV-8603 + WV-8808 | 100.0 | 102.2 | 99.4 | 100.3 | 99.1 | 98.5 | 99.2 | 95.6 |
| WV-8608 + WV-8808 | 100.0 | 98.8 | 97.5 | 96.9 | 95.9 | 96.9 | 95.5 | 94.1 |
| WV-9889 + WV-8808 | 100.0 | 99.9 | 99.2 | 99.5 | 98.6 | 97.8 | 97.2 | 96.3 |
| WV-9890 + WV-8808 | 100.0 | 107.5 | 100.7 | 100.8 | 99.1 | 104.2 | 98.3 | 97.5 |
| WV-8601 + WV-8807 | 100.0 | 93.1 | 90.9 | 90.4 | 91.4 | 88.2 | 85.6 | 80.1 |
| WV-8605 + WV-8807 | 100.0 | 98.3 | 96.0 | 96.4 | 96.0 | 96.0 | 87.1 | 86.7 |
| WV-8606 + WV-8807 | 100.0 | 90.1 | 91.6 | 90.7 | 90.9 | 86.6 | 82.4 | 79.1 |
| WV-8609 + WV-8807 | 100.0 | 92.1 | 89.0 | 83.8 | 85.5 | 75.6 | 75.7 | 69.0 |
| WV-8601 + WV-8808 | 100.0 | 99.0 | 100.2 | 100.2 | 97.8 | 97.6 | 97.2 | 94.1 |
| WV-8605 + WV-8808 | 100.0 | 100.7 | 99.7 | 100.9 | 98.4 | 99.1 | 98.5 | 94.6 |
| WV-8606 + WV-8808 | 100.0 | 101.2 | 97.6 | 98.1 | 96.3 | 97.0 | 96.5 | 93.9 |
| WV-8609 + WV-8808 | 100.0 | 96.7 | 93.7 | 98.6 | 96.8 | 95.6 | 96.2 | 94.5 |
| WV-9891 + WV-8807 | 100.0 | 91.6 | 88.3 | 86.1 | 87.9 | 79.8 | 75.6 | 75.2 |
| WV-9892 + WV-8807 | 100.0 | 93.2 | 86.9 | 83.5 | 84.3 | 74.2 | 64.2 | 58.6 |
| WV-9893 + WV-8807 | 100.0 | 94.6 | 88.6 | 86.6 | 88.6 | 77.4 | 69.0 | 65.6 |
| WV-9891 + WV-8808 | 100.0 | 98.3 | 98.6 | 96.9 | 95.0 | 94.2 | 92.8 | 89.8 |
| WV-9892 + WV-8808 | 100.0 | 100.7 | 101.8 | 100.7 | 99.3 | 97.9 | 97.4 | 95.7 |
| WV-9893 + WV-8808 | 100.0 | 100.1 | 100.3 | 100.2 | 99.3 | 96.3 | 96.1 | 93.5 |
| WV-9894 + WV-8807 | 100.0 | 96.2 | 90.1 | 85.1 | 84.7 | 79.5 | 76.8 | 74.9 |
| WV-9895 + WV-8807 | 100.0 | 97.0 | 92.5 | 87.1 | 84.3 | 77.0 | 71.8 | 70.7 |
| WV-9896 + WV-8807 | 100.0 | 98.2 | 93.2 | 86.0 | 81.8 | 74.8 | 69.2 | 70.0 |
| WV-9894 + WV-8808 | 100.0 | 98.8 | 97.1 | 97.4 | 96.1 | 94.0 | 95.4 | 91.4 |
| WV-9895 + WV-8808 | 100.0 | 99.9 | 97.1 | 98.5 | 99.3 | 96.1 | 96.4 | 93.6 |
| WV-9896 + WV-8808 | 100.0 | 99.2 | 99.0 | 98.3 | 96.4 | 95.6 | 93.8 | 90.6 |

Various PNPLA3 oligonucleotides were tested in vitro in an RNaseH assay.
PNPLA3 oligonucleotides were incubated in the presence of target RNA which was the wt allele (WV-8808) or the 148 allele (WV-8807). Numbers represent the percentage of target RNA (WV-8808 or WV-8807) remaining. In this table, 100.00 would represent 100% PNPLA3 mRNA level and 0.00 would represent 0% PNPLA3 mRNA after treatment with oligonucleotides.
The PNPLA3 oligonucleotides WV-980, WV-9893, WV-8606 and WV-7805 also significantly reduced PNPLA3 148 mutant mRNA levels in Huh7 cells with PNLA3 148 mutation (to between about 25 to 55% residual mutant PNPLA3, relative to HPRT1, at 12.5 nM), but these oligonucleotides did not significantly reduce wt PNPLA3 levels in Huh7 cells with wt PNPLA3 (about 90% or more residual wt PNPLA3 level at 12.5 nM).

TABLE 120
Activity of oligonucleotides.

| | Conc. (nM) (exp10) | | | | | | | |
|---|---|---|---|---|---|---|---|---|
| | 1.398 | 0.796 | 0.194 | −0.408 | −1.010 | −1.612 | −2.214 | −2.816 |
| WV-3380 | 0.059 | 0.193 | 0.568 | 0.809 | 0.809 | 0.917 | 1.032 | 0.983 |
| | 0.092 | 0.365 | 0.720 | 0.862 | | 1.004 | 1.121 | |
| WV-3986 | 0.379 | 0.444 | 0.673 | 0.790 | 0.870 | 0.870 | 0.993 | 0.933 |
| | 0.486 | 0.551 | 0.752 | 0.901 | 1.007 | 0.939 | 0.876 | 1.140 |
| WV-3987 | 0.400 | 0.521 | 0.742 | 0.870 | 0.959 | 0.889 | 0.986 | 0.952 |
| | 0.451 | 0.594 | 0.914 | 0.966 | 1.086 | 0.972 | 1.021 | 1.072 |
| WV-3988 | 0.496 | 0.521 | 0.742 | 1.021 | 0.946 | 1.079 | 0.907 | 0.959 |
| | 0.328 | 0.615 | 0.920 | 1.057 | 1.064 | 0.979 | 0.901 | 1.133 |
| WV-3393 | 0.115 | 0.165 | 0.438 | 0.795 | 0.882 | 1.028 | 1.086 | 0.986 |
| | 0.080 | 0.218 | 0.555 | 0.835 | 0.952 | 1.064 | 0.933 | 1.057 |
| WV-3989 | 0.316 | 0.279 | 0.547 | 0.790 | 0.852 | 0.993 | 0.966 | 1.000 |
| | 0.295 | 0.412 | 0.651 | 0.889 | 1.049 | 1.140 | 0.986 | 1.173 |
| WV-3990 | 0.259 | 0.444 | 0.624 | 0.979 | 1.109 | 1.021 | 1.007 | 0.993 |
| | 0.274 | 0.559 | 0.779 | 0.959 | 1.079 | 1.042 | 1.049 | 1.164 |

Various PNPLA3 oligonucleotides were tested in vitro in Hep3B cells at 48 hours after treatment with oligonucleotide. In this table, 1.00 would represent 100% PNPLA3 mRNA level and 0.00 would represent 0% PNPLA3 mRNA after treatment with oligonucleotides.

TABLE 121
Activity of oligonucleotides.

| | Conc. (nM) (exp10) | | | | | | | |
|---|---|---|---|---|---|---|---|---|
| | 1.398 | 0.796 | 0.194 | −0.408 | −1.010 | −1.612 | −2.214 | −2.816 |
| WV-3402 | 0.146 | 0.207 | 0.457 | 0.907 | 0.933 | 0.959 | 0.939 | 0.952 |
| | 0.104 | 0.319 | 0.697 | 0.914 | 0.926 | 1.028 | 1.094 | 1.102 |
| WV-3991 | 0.216 | 0.423 | 0.582 | 0.858 | 0.907 | 0.966 | 0.870 | 0.966 |
| | 0.303 | 0.500 | 0.722 | 1.049 | 0.895 | 0.979 | 1.042 | 1.035 |
| WV-3992 | 0.303 | 0.384 | 0.594 | 0.823 | 0.818 | 0.907 | 0.847 | 0.852 |
| | 0.321 | 0.423 | 0.673 | 0.914 | 0.933 | 0.907 | 0.959 | 1.057 |

Various PNPLA3 oligonucleotides were tested in vitro in Hep3B cells at 48 hours after treatment with oligonucleotide. In this table, 1.00 would represent 100% PNPLA3 mRNA level and 0.00 would represent 0% PNPLA3 mRNA after treatment with oligonucleotides.

TABLE 122
Activity of oligonucleotides.

| | Conc. (nM) (exp 10) | | | | | | | |
|---|---|---|---|---|---|---|---|---|
| | 1.398 | 0.796 | 0.194 | −0.408 | −1.010 | −1.612 | −2.214 | −2.816 |
| WV-3387 | 0.091 | 0.205 | 0.527 | 0.811 | 1.070 | 0.881 | 0.977 | 0.971 |
| | 0.081 | 0.135 | 0.391 | 0.851 | 1.033 | 0.964 | 0.944 | 1.070 |
| WV-3993 | 0.998 | 0.912 | 1.026 | 1.062 | 1.308 | 1.019 | 1.019 | 0.957 |
| | 0.869 | 0.912 | 1.123 | 1.077 | 1.084 | 1.048 | 1.055 | 1.100 |
| WV-3994 | 0.944 | 0.991 | 1.195 | 1.040 | 1.107 | 1.012 | 1.123 | 0.971 |
| | 0.857 | 0.991 | 1.146 | 1.077 | 1.092 | 1.138 | 1.033 | 1.154 |

Various PNPLA3 oligonucleotides were tested in vitro in Hep3B cells at 48 hours after treatment with oligonucleotide. In this table, 1.00 would represent 100% PNPLA3 mRNA level and 0.00 would represent 0% PNPLA3 mRNA after treatment with oligonucleotides.

TABLE 123
Activity of oligonucleotides.

| | Conc. (nM) (exp10) | | | | | | | |
|---|---|---|---|---|---|---|---|---|
| | 1.398 | 0.796 | 0.194 | −0.408 | −1.010 | −1.612 | −2.214 | −2.816 |
| WV-3391 | 0.176 | 0.264 | 0.502 | 0.912 | 0.944 | 1.170 | 1.077 | 0.887 |
| | 0.141 | 0.230 | 0.531 | 0.788 | 1.040 | 1.146 | 1.005 | 1.005 |
| WV-3995 | 0.925 | 1.026 | 0.977 | 1.131 | 1.162 | 0.984 | 1.123 | 0.811 |
| | 0.751 | 0.957 | | 1.123 | | 1.162 | 1.062 | 0.971 |
| WV-3996 | 0.893 | 0.899 | 0.833 | 0.991 | 1.203 | 1.146 | 1.138 | 0.964 |
| | 0.875 | 0.899 | 0.851 | 1.187 | | 1.123 | 1.040 | 1.131 |

Various PNPLA3 oligonucleotides were tested in vitro in Hep3B cells at 48 hours after treatment with oligonucleotide. In this table, 1.00 would represent 100% PNPLA3 mRNA level and 0.00 would represent 0% PNPLA3 mRNA after treatment with oligonucleotides.

TABLE 124
Activity of oligonucleotides.

| | | |
|---|---|---|
| 0.312 nM | 1.25 nM | 5 nM |

| | | | | | | |
|---|---|---|---|---|---|---|
| Control | 76.5 | 84.9 | 111.7 | 106.6 | 113.9 | 99.1 |
| WV-3380 | 86.7 | 79.0 | 58.4 | 60.3 | 27.2 | 28.6 |
| wv-4054 | 60.3 | 49.1 | 67.6 | 53.4 | 65.5 | 45.5 |
| wv-4098 | 62.0 | 43.3 | 57.7 | 50.9 | 38.5 | 52.8 |
| WV-6585 | 58.8 | 56.9 | 71.3 | 90.8 | 89.4 | 79.0 |
| WV-6586 | 82.1 | 53.7 | 82.5 | 79.5 | 89.0 | 66.2 |
| WV-6587 | 49.9 | 45.3 | 103.1 | 56.0 | 74.7 | 77.9 |
| WV-6588 | 58.6 | 60.9 | 82.1 | 84.9 | 86.5 | 85.3 |
| WV-6589 | 61.8 | 51.3 | 92.2 | 94.4 | 77.8 | 83.5 |
| WV-6590 | 63.7 | 64.3 | 62.9 | 83.9 | 85.5 | 60.8 |
| WV-6591 | 83.3 | 71.4 | 74.7 | 75.2 | 76.3 | 94.2 |
| WV-6592 | 49.7 | 39.8 | 51.4 | 40.4 | 54.3 | 39.4 |
| WV-6593 | 68.1 | 77.7 | 58.3 | 89.3 | 64.6 | 70.7 |
| WV-6594 | 82.1 | 53.7 | 58.7 | 59.1 | 61.6 | 62.2 |
| WV-4054 | 58.7 | 35.6 | 55.3 | 49.8 | 66.0 | 60.3 |
| WV-6595 | 40.9 | 52.4 | 58.0 | 54.5 | 60.5 | 56.2 |
| WV-6596 | 48.6 | 40.2 | 57.2 | 49.4 | 46.9 | 49.2 |
| WV-6597 | 27.7 | 31.4 | 41.8 | 52.7 | 61.3 | 45.0 |
| WV-6598 | 40.1 | 35.4 | 59.1 | 53.6 | 44.5 | 42.3 |
| WV-6599 | 37.3 | 54.3 | 73.0 | 61.8 | 76.6 | 69.6 |
| WV-6600 | 64.7 | 67.5 | 88.7 | 105.6 | 95.3 | 115.7 |
| WV-6601 | 74.2 | 48.0 | 64.4 | 51.4 | 97.0 | 81.9 |
| WV-6602 | 64.7 | 51.6 | 64.0 | 63.3 | 95.8 | 64.1 |
| WV-6603 | 57.8 | 40.4 | 85.7 | 73.9 | 67.1 | 71.1 |
| WV-6604 | 50.7 | 50.5 | 57.8 | 47.0 | 72.0 | 47.1 |
| WV-6605 | 52.1 | 52.5 | 58.2 | 57.8 | 58.9 | 57.8 |
| WV-6606 | 27.1 | 56.6 | 52.4 | 51.1 | 77.7 | 53.9 |
| WV-6607 | 35.7 | 41.6 | 44.0 | 37.0 | 76.2 | 53.7 |

Various PNPLA3 oligonucleotides were tested in vitro in cells after treatment with oligonucleotide. In this table, 100.00 would represent 100% PNPLA3 mRNA level and 0.00 would represent 0% PNPLA3 mRNA after treatment with oligonucleotides.

TABLE 125
Activity of oligonucleotides.

| | | |
|---|---|---|
| 0.312 nM | 1.25 nM | 5 nM |

| | | | | | | |
|---|---|---|---|---|---|---|
| Control | 76.5 | 84.9 | 111.7 | 106.6 | 113.9 | 99.1 |
| WV-3380 | 86.7 | 79.0 | 58.4 | 60.3 | 27.2 | 28.6 |
| wv-4054 | 60.3 | 49.1 | 67.6 | 53.4 | 65.5 | 45.5 |
| wv-4098 | 62.0 | 43.3 | 57.7 | 50.9 | 38.5 | 52.8 |
| WV-6608 | 74.0 | 71.3 | 64.3 | 80.2 | 90.8 | 81.4 |
| WV-6609 | 88.6 | 51.9 | 71.6 | 57.7 | 66.3 | 61.2 |
| WV-6610 | 51.1 | 59.5 | 65.1 | 51.7 | 61.2 | 60.6 |
| WV-6611 | 40.9 | 47.5 | 61.7 | 57.3 | 63.2 | 75.1 |
| WV-6612 | 50.9 | 59.8 | 50.6 | 53.3 | 75.4 | 54.3 |
| WV-6613 | 39.0 | 49.1 | 49.5 | 35.6 | 53.8 | 43.5 |
| WV-6614 | 51.6 | 65.2 | 43.6 | 59.6 | 47.8 | 67.1 |
| WV-6615 | 45.7 | 70.0 | 40.0 | 41.6 | 44.1 | 53.2 |
| WV-5305 | 61.4 | 82.3 | 73.1 | 100.3 | 83.3 | 101.0 |
| WV-6616 | 63.6 | 49.3 | 67.0 | 74.3 | 62.0 | 70.1 |
| WV-6617 | 67.5 | 45.2 | 44.0 | 54.6 | 54.9 | 59.2 |
| WV-6618 | 53.4 | 44.2 | 45.4 | 46.4 | 66.5 | 32.9 |
| WV-6619 | 56.7 | 28.9 | 64.4 | 50.3 | 49.7 | 42.9 |
| WV-6620 | 61.8 | 55.6 | 57.8 | 90.1 | 37.8 | 52.5 |
| WV-6621 | 63.3 | 51.1 | 55.0 | 73.3 | 31.4 | 54.7 |
| WV-6622 | 67.5 | 34.7 | 55.2 | 48.0 | 27.4 | 61.7 |
| WV-6623 | 57.1 | 56.5 | 73.3 | 88.7 | 78.4 | 95.9 |

Various PNPLA3 oligonucleotides were tested in vitro in cells after treatment with oligonucleotide. In this table, 100.00 would represent 100% PNPLA3 mRNA level and 0.00 would represent 0% PNPLA3 mRNA after treatment with oligonucleotides.

TABLE 126
Activity of oligonucleotides.

| | | |
|---|---|---|
| 0.312 nM | 1.25 nM | 5 nM |

| | | | | | | |
|---|---|---|---|---|---|---|
| Control | 76.5 | 84.9 | 111.7 | 106.6 | 113.9 | 99.1 |
| WV-3380 | 86.7 | 79.0 | 58.4 | 60.3 | 27.2 | 28.6 |
| wv-4054 | 60.3 | 49.1 | 67.6 | 53.4 | 65.5 | 45.5 |
| wv-4098 | 62.0 | 43.3 | 57.7 | 50.9 | 38.5 | 52.8 |
| WV-6624 | 59.2 | 71.5 | 52.2 | 78.3 | 64.7 | 59.0 |
| WV-6625 | 53.7 | 50.7 | 49.4 | 41.9 | 53.1 | 51.1 |
| WV-6626 | 62.3 | 58.2 | 65.0 | 70.4 | 39.7 | 53.9 |
| WV-6627 | 57.5 | 51.1 | 66.9 | 59.1 | 49.2 | 52.9 |
| WV-6628 | 44.8 | 48.6 | 61.5 | 59.8 | 50.4 | 63.3 |
| WV-6629 | 61.4 | 54.4 | 59.5 | 86.7 | 52.5 | 58.3 |
| WV-6630 | 40.8 | 54.1 | 44.5 | 46.3 | 56.3 | 54.3 |
| WV-6631 | 61.0 | 61.4 | 47.6 | 111.2 | 75.1 | 70.1 |
| WV-6632 | 67.5 | 96.3 | 93.1 | 79.0 | 84.8 | 86.5 |
| WV-6633 | 61.1 | 56.4 | 51.8 | 37.1 | 40.6 | 46.0 |
| WV-6634 | 66.7 | 65.7 | 52.8 | 51.9 | 39.1 | 39.0 |
| WV-6635 | 90.3 | 63.6 | 72.6 | 68.6 | 66.7 | 70.6 |
| WV-6636 | 68.0 | 40.3 | 57.7 | 55.9 | 45.1 | 50.6 |
| WV-6637 | 68.0 | 46.2 | 46.9 | 60.4 | 40.2 | 69.4 |
| WV-6638 | 46.2 | 38.0 | 64.8 | 41.3 | 40.3 | 32.9 |

Various PNPLA3 oligonucleotides were tested in vitro in cells after treatment with oligonucleotide. In this table, 100.00 would represent 100% PNPLA3 mRNA level and 0.00 would represent 0% PNPLA3 mRNA after treatment with oligonucleotides.

TABLE 127
Activity of oligonucleotides.

| | | |
|---|---|---|
| 0.312 nM | 1.25 nM | 5 nM |

| | | | | | | |
|---|---|---|---|---|---|---|
| Control | 76.5 | 84.9 | 111.7 | 106.6 | 113.9 | 99.1 |
| WV-3380 | 86.7 | 79.0 | 58.4 | 60.3 | 27.2 | 28.6 |
| wv-4054 | 60.3 | 49.1 | 67.6 | 53.4 | 65.5 | 45.5 |
| wv-4098 | 62.0 | 43.3 | 57.7 | 50.9 | 38.5 | 52.8 |
| WV-6639 | 94.8 | 81.0 | 113.1 | 90.2 | 68.5 | 69.4 |
| WV-6640 | 91.3 | 78.0 | 60.4 | 87.5 | 87.7 | 61.7 |
| WV-6641 | 76.4 | 113.6 | 83.1 | 87.6 | 59.6 | 65.0 |
| WV-6642 | 95.0 | 104.3 | 90.6 | 98.5 | 74.8 | 73.5 |
| WV-6643 | 126.6 | 90.1 | 96.8 | 77.1 | 60.0 | 75.3 |
| WV-6644 | 125.8 | 94.5 | 89.9 | 85.1 | 81.4 | 63.5 |
| WV-6645 | 93.1 | 74.3 | 97.7 | 66.4 | 68.9 | 40.8 |
| WV-6646 | 83.5 | 80.4 | 85.1 | 60.9 | 56.7 | 33.7 |
| WV-6647 | 92.9 | 77.8 | 91.8 | 79.8 | 125.9 | 62.3 |
| WV-6648 | 104.4 | 88.7 | 92.0 | 111.5 | 67.3 | 73.3 |
| WV-6649 | 106.9 | 85.8 | 79.7 | 85.5 | 78.4 | 74.5 |
| WV-6650 | 94.6 | 79.2 | 87.4 | 91.5 | 66.5 | 97.9 |
| WV-6651 | 116.4 | 74.8 | 92.2 | 96.8 | 58.0 | 57.3 |
| WV-6652 | 114.1 | 70.2 | 110.9 | 94.0 | 88.6 | 66.4 |
| WV-6653 | 116.1 | 89.1 | 90.0 | 100.0 | 77.3 | 72.9 |
| WV-6654 | 84.9 | 99.0 | 101.1 | 128.1 | 67.4 | 70.9 |
| WV-6655 | 102.0 | 99.5 | 116.9 | 83.8 | 114.7 | 85.6 |
| WV-6656 | 115.3 | 119.9 | 114.7 | 85.2 | 101.0 | 108.4 |
| WV-6657 | 88.6 | 94.1 | 114.1 | 109.7 | 94.6 | 100.4 |
| WV-6658 | 114.4 | 92.2 | 131.2 | 134.7 | 133.3 | 90.6 |
| WV-6659 | 116.9 | 104.2 | 122.1 | 96.6 | 99.8 | 122.3 |
| WV-6660 | 104.7 | 79.5 | 124.1 | 100.2 | 79.7 | 88.5 |

Various PNPLA3 oligonucleotides were tested in vitro in cells after treatment with oligonucleotide. In this table, 100.00 would represent 100% PNPLA3 mRNA level and 0.00 would represent 0% PNPLA3 mRNA after treatment with oligonucleotides.

TABLE 129
Activity of oligonucleotides.

| | 0 | 0.1 nM | 0.4 nM | 3.0 nM | 12.5 nM |
|---|---|---|---|---|---|
| WV-4098 | 96.1 | 76.8 | 61.7 | 58.2 | 53.6 |
| | 105.7 | 73.2 | 58.3 | 47.9 | 57.9 |
| WV-7776 | 107.4 | 92.5 | 117.0 | 85.0 | 74.7 |
| | 85.4 | 93.1 | 102.7 | 73.4 | 62.5 |
| WV-7777 | 107.4 | 107.4 | 88.2 | 63.2 | 71.7 |
| | 90.9 | 90.9 | 73.4 | 73.1 | 59.8 |

Various PNPLA3 oligonucleotides were tested in vitro in cells after treatment with oligonucleotide. In this table, 100.00 would represent 100% PNPLA3 mRNA level and 0.00 would represent 0% PNPLA3 mRNA after treatment with oligonucleotides.

TABLE 130
Activity of oligonucleotides.

| | WV-4098 | WV-7465 | WV-8076 |
|---|---|---|---|
| 0 | 103.4 | 112.5 | 101.0 |
| | 86.2 | 95.5 | 109.7 |
| 0.02 nM | 82.5 | 62.8 | 67.2 |
| | 91.2 | 61.6 | 79.1 |
| 0.1 nM | 54.4 | 39.5 | 46.5 |
| | 56.3 | 48.4 | 72.2 |
| 0.4 nM | 49.6 | 31.2 | 46.6 |
| | 48.1 | 42.7 | 43.9 |
| 3.125 nM | 21.9 | 39.2 | 82.0 |
| | 33.7 | 37.1 | 79.7 |

Various PNPLA3 oligonucleotides were tested in vitro in Huh7 cells. Residual levels of PNPLA3 mRNA are shown, wherein PNPLA3 is relative to HPRT1. In this table, 100.00 would represent 100% PNPLA3 mRNA level and 0.00 would represent 0% PNPLA3 mRNA after treatment with oligonucleotides.

TABLE 131
Activity of oligonucleotides.

| | WV-4098 | WV-8080 | WV-8081 |
|---|---|---|---|
| 0 | 103.4 | 83.3 | 79.2 |
| | 86.2 | 109.8 | 89.9 |
| 0.02 nM | 82.5 | 58.1 | 97.2 |
| | 91.2 | 89.1 | 92.4 |
| 0.1 nM | 54.4 | 71.2 | 91.7 |
| | 56.3 | 72.1 | 95.5 |
| 0.4 nM | 49.6 | 79.8 | 94.4 |
| | 48.1 | 97.9 | 108.2 |
| 3.125 nM | 21.9 | 59.3 | 115.6 |
| | 33.7 | 62.0 | 122.4 |

Various PNPLA3 oligonucleotides were tested in vitro in Huh7 cells. Residual levels of PNPLA3 mRNA are shown, wherein PNPLA3 is relative to HPRT1. In this table, 100.00 would represent 100% PNPLA3 mRNA level and 0.00 would represent 0% PNPLA3 mRNA after treatment with oligonucleotides.

TABLE 132
Activity of oligonucleotides.

| | WV-4098 | WV-8077 | WV-8078 | WV-8079 |
|---|---|---|---|---|
| 0 | 103.4 | 108.4 | 94.0 | 80.9 |
| | 86.2 | 107.6 | 98.3 | 87.7 |
| 0.02 nM | 82.5 | 102.1 | 96.4 | 71.1 |
| | 91.2 | | 99.8 | 69.3 |
| 0.1 nM | 54.4 | 87.6 | 93.9 | 75.6 |
| | 56.3 | 87.9 | 118.3 | 97.5 |
| 0.4 nM | 49.6 | 83.4 | 91.0 | 88.6 |
| | 48.1 | 97.1 | 116.6 | 120.6 |
| 3.125 nM | 21.9 | 79.8 | 73.7 | 105.4 |
| | 33.7 | 74.8 | 87.7 | |

Various PNPLA3 oligonucleotides were tested in vitro in Huh7 cells. Residual levels of PNPLA3 mRNA are shown, wherein PNPLA3 is relative to HPRT1. In this table, 100.00 would represent 100% PNPLA3 mRNA level and 0.00 would represent 0% PNPLA3 mRNA after treatment with oligonucleotides.

TABLE 133

| | WV-4098 | WV-7465 |
|---|---|---|
| 0 | 103.4 | 112.5 |
| | 86.2 | 95.5 |
| 0.02 nM | 82.5 | 62.8 |
| | 91.2 | 61.6 |
| 0.1 nM | 54.4 | 39.5 |
| | 56.3 | 48.4 |
| 0.4 nM | 49.6 | 31.2 |
| | 48.1 | 42.7 |
| 3.125 nM | 21.9 | 39.2 |
| | 33.7 | 37.1 |

Various PNPLA3 oligonucleotides were tested in Huh7 cells. Residual levels of PNPLA3 mRNA are shown, wherein PNPLA3 is relative to HPRT1. In this table, 100.00 would represent 100% PNPLA3 mRNA level and 0.00 would represent 0% PNPLA3 mRNA after treatment with oligonucleotides.
Several PNPLA3 oligonucleotides were also tested in vitro for cytokine release, including WV-8061, WV-8291, WV-8698, and WV-8700. None of the 4 PNPLA3 ssRNAi agents induced cytokine release (IL-113, IL-6, MCP-1, IL-12p40, IL-12p70, IL-1α, MIP-1 α, MIP-1β, TNFα) in any of the donor samples. In contrast, positive control induced cytokine activation even at low concentrations (0.78 ug/ml).

### Example 27. Example Additional Components of Oligonucleotides

[1816] Various oligonucleotides were designed and constructed which comprise various additional components. Various additional PNPLA3 oligonucleotides described herein can also be conjugated to these additional components.

[1817] These additional components include those listed herein:

Tri-antennary ligand is also known as Tri-PFE ASPGR ligand or Tri-PFE ligand or Tri-PFE:

[chemical structure]

### Bis-Antennary (or Bi-Antennary) Ligand, Also Known as Bis- (or Bi-) Antennary PFE Ligand or Bis- (or Bi-) Antennary PFE ASPGR Ligand or Bis-PFE:

[chemical structure]

### Mono-Antennary Ligand, Also Known as Mono-Antennary PFE Ligand or Mono-Antennary PFE ASPGR Ligand or Mono-PFE:

[chemical structure]

### Tri-Antennary GalNAc or Tri-GalNAc:

[chemical structure]

Protected versions of:

### Bis-Antennary (Bi-Antennary) GalNAc or Bis-GalNAc:

[chemical structure]

### Mono-Antennary GalNac or Mono-GalNAc:

[chemical structure]

[1823] These structures represent the protected versions, as they comprise —OAc (—O-acetate groups). In some embodiments, the Ac groups are removed during de-protection following conjugation of the compound to the oligonucleotide. In some embodiments, de-protection is performed with concentrated ammonium hydroxide, e.g., as described in Example 37B. In the de-protected versions of these structures, —OAc is replaced by —OH.

Some non-limiting examples of processes for production of various additional components are described below:

[chemical structure]

[chemical structure]

[chemical structure]

[1824] purified by C18 cartridge eluting with 0.1% TFA in water and acetonitrile
   [1825] 0.566 g (GL-N12-55) (containing 4 TFA)
   [1826] 2.14 g (GL-N12-58) (containing 3.7 TFA)

[chemical structure]

[chemical structure]

[1827] Various additional components described herein can be conjugated to various oligonucleotides described herein.

### Example 28. Example Analytical Methods

[1828] 1.5 minute run LRMS (low resolution mass spectroscopy): Waters Acqity HSS T3, 2.1 mm×50 mm, C18, 1.7 μm; Mobile Phase: A: 0.1% formic acid in water (v/v); Mobile phase B: 0.1% formic acid in acetonitrile (v/v); Flow-1.25 ml/minute; Initial conditions: A-95%:B-5%; hold at initial from 0.0-0.1 minute; Linear Ramp to A-5%:B-95% over 0.1-1.0 minute; hold at A-5%:B-95% from 1.0-1.1 minute; return to initial conditions 1.1-1.5 minute.

3.0 minute run LRMS (low resolution mass spectroscopy): Waters Acqity HSS T3, 2.1 mm×50 mm, C18, 1.7 μm; Mobile Phase: A: 0.1% formic acid in water (v/v); Mobile phase B: 0.1% formic acid in acetonitrile (v/v); Flow-1.25 ml/minute; Initial conditions: A-95%:B-5%; hold at initial from 0.0-0.1 minute; Linear Ramp to A-5%:B-95% over 0.1-2.6 minute; hold at A-5%:B-95% from 2.6-2.95 minute; return to initial conditions 2.95-3.0 minute.

### 5-carboxypentyl 5,9,16,22-tetraoxo-11,11-bis{[3-oxo-3-({3-[(5-{[3,4,6-tri-O-acetyl-2-(acetylamino)-2-deoxy-β-D-galactopyranosyl]oxy}pentanoyl)amino]propyl}amino)propoxy]methyl}-26-{[3,4,6-tri-O-acetyl-2-(acetylamino)-2-deoxy-β-D-galactopyranosyl]oxy}-13-oxa-4,10,17,21-tetraazahexacos-1-yl phosphate

[chemical structure]

### Reaction Scheme:

[chemical structure]

[chemical structure]

### Step 1: 6-Hydroxyhexanoate

[1831] A mixture of sodium hydroxide (9.02 g, 226 mmol) and 6-hexanolactone (25 mL, 0.23 mmol) in water (401 mL) was heated at 70° C. overnight. TLC showed complete consumption of the starting material. The water was removed carefully at 50° C. with a rotary evaporator and the resulting white solid was azeotroped with toluene. After drying under high vacuum overnight, the solid was suspended in acetone (100 mL) and tetrabutylammonium bromide (3.64 g, 11.3 mmol) and benzyl bromide (32.2 mL, 271 mmol) were added. The reaction mixture was heated at reflux until TLC analysis showed complete consumption of intermediate carboxylic acid (96 h). The solvent was removed in vacuo and the residue was partitioned between aqueous hydrochloric acid and ethyl acetate. The aqueous layer was extracted with ethyl acetate (×2). The combined organic extracts were washed with saturated sodium bicarbonate (×2), brine, dried over magnesium sulfate, filtered and concentrated in vacuo. The crude residue was purified by a silica gel plug (20-70% ethyl acetate in heptane) to afford the title compound as a colorless oil (43.9 g, 88%). ¹H NMR (600 MHz, CDCl₃) δ ppm 7.40-7.30 (m, 5H), 5.12 (s, 2H), 3.63 (t, 2H), 2.38 (t, 2H), 1.73-1.65 (m, 2H), 1.62-1.53 (m, 2H), 1.44-1.35 (m, 2H), 1.28 (br.s., 1H).

### Step 2: Benzyl 6-(((3-((tert-butoxycarbonyl)amino)propoxy)(2-cyanoethoxy)phosphoryl)oxy)hexanoate

[1832] To a solution of 2-cyanoethyl-N,N-diisopropylchlorophosphoramidite (20.3 g, 67.5 mmol) in anhydrous dichloromethane (150 mL) at 0° C. was slowly added 4,5-dicyanoimidazole (1 M in acetonitrile, 31.5 mL, 31.5 mmol) at 0° C. 6-hydroxyhexanoate (10.0 g, 45.0 mmol) was then added dropwise to the mixture at 0° C. under an inert atmosphere. The mixture was stirred at 0° C. until TLC analysis showed consumption of starting material (1 h). The reaction was quenched with saturated sodium bicarbonate (80 mL). The biphasic mixture was then separated and the aqueous layer was extracted with dichloromethane (2×60 mL). The combined organic phase was washed with brine, dried over anhydrous sodium sulfate, filtered and concentrated to dryness to give the crude product (23.0 g, >100%) as a light yellow oil, which was used in the next step directly. This crude material was dissolved in acetonitrile (50 mL) and added dropwise over 10 min to a solution of 3-(Boc-amino)-1-propanol (10.0 g, 57.2 mmol) and tetrazole (19.1 g, 272 mmol) in anhydrous acetonitrile (300 mL). The resulting colorless solution was stirred at ambient temperature for 1.5 h. TLC showed the starting material was consumed completely. Then a solution of 12 (0.4 M in THF/H₂O/pyridine (78:20:2), 90 mL, 54.4 mmol) was added slowly to the above reaction mixture and at the end of the addition the brown color didn't dissipate. The mixture was stirred at ambient temperature until TLC analysis showed the reaction was complete (1 h). The mixture was quenched with saturated sodium sulfite and concentrated in vacuo to remove the organic solvents. The remaining mixture was diluted with water and extracted with ethyl acetate (×2). The combined organic phase was washed with saturated ammonium chloride and brine, dried over anhydrous sodium sulfate, filtered and concentrated in vacuo. The crude material was purified by silica gel flash chromatography (20-75 ethyl acetate in petroleum ether) to afford the title compound as colorless oil (10.0 g, 43% over three steps). ¹H NMR (400 MHz, CDCl₃) δ ppm 7.41-7.28 (m, 5H), 5.11 (s, 2H), 4.23 (ddd, 2H), 4.18-4.04 (m, 4H), 3.24 (q, 2H), 2.75 (ddd, 2H), 2.38 (t, 2H), 1.87 (dq, 2H), 1.76-1.64 (m, 4H), 1.43 (s, 9H), 1.31-1.20 (m, 2H).

### Step 3: 3-Ammoniopropyl (6-(benzyloxy)-6-oxohexyl)phosphate

[1833] To a solution of benzyl 6-(((3-((tert-butoxycarbonyl)amino)propoxy)(2-cyanoethoxy)phosphoryl)oxy)hexanoate (9.00 g, 17.6 mmol) in anhydrous 1,4-dioxane (36 mL) was added hydrochloric acid (100 mL, 400 mmol, 4 M in dioxane) dropwise at 0° C. The resulting colorless solution was stirred at ambient temperature for 1.5 h. The mixture was concentrated to dryness to give the crude product (7.90 g) as a colorless gum, which was used in the next step directly. To a solution of this crude material acetonitrile (72 mL) was added triethylamine (36 mL, 0.26 mmol). The resulting white suspension was stirred at 25° C. for 16 h. The mixture was then concentrated and the crude material was purified by silica gel flash chromatography (5-50% methanol in dichloromethane, 1% ammonium hydroxide) to afford the title compound as a white solid (3.70 g, 59% over two steps). ¹H NMR (400 MHz, CD₃OD) δ ppm 7.41-7.27 (m, 5H), 5.11 (s, 2H), 3.95 (dt, 2H), 3.85 (q, 2H), 3.08 (t, 2H), 2.39 (t, 2H), 1.94 (dq, 2H), 1.78-1.56 (m, 4H), 1.51-1.34 (m, 2H). LCMS (m/z) for C₁₆H₂₇NO₆P⁺ (M+H)⁺ 360.1; retention time=0.677 min (UPLC 1.5 min method).

### Step 4: 6-(Benzyloxy)-6-oxohexyl 26-{[4,6-di-O-acetyl-2-(acetylamino)-2-deoxy-β-D-galactopyranosyl]oxy}-5,9,16,22-tetraoxo-11,11-bis {[3-oxo-3-({3-[(5-{[3,4,6-tri-O-acetyl-2-(acetylamino)-2-deoxy-β-D-galactopyranosyl]oxy}pentanoyl)amino]propyl}amino)propoxy]methyl}-13-oxa-4,10,17,21-tetraazahexacos-1-yl phosphate

[1834] A solution of N,N-diisopropylethylamine (305 mg, 2.36 mmol, 0.41 mL) and 3-ammoniopropyl 6-(benzyloxy)-6-oxohexyl phosphate (297 mg, 0.825 mmol) in N,N-dimethylformamide (5 mL) was added to a solution of 18,18-bis(17-((1S,2R,3R,4R,5S)-4-acetamido-2,3-dihydroxy-6,8-dioxabicyclo[3.2.1]octan-1-yl)-5,11-dioxo-2,16-dioxa-6,10-diazaheptadecyl)-1-((1S,2R,3R,4R,5S)-4-acetamido-2,3-dihydroxy-6,8-dioxabicyclo[3.2.1]octan-1-yl)-′7,13,20-trioxo-2,16-dioxa-8,12,19-triazatetracosan-24-oic acid (1.50 g, 0.790 mmol) in DMF (10 mL). 1-[Bis(dimethylamino)methylene]-1H-1,2,3-triazolo[4,5-b]pyridinium 3-oxid hexafluorophosphate (328 mg, 0.065 mmol) was then added to the reaction mixture at room temperature. After 1 h, the reaction was quenched with saturated ammonium chloride (30 mL) and extracted with dichloromethane (4×30 mL). The combined organic layers were washed with brine, dried over sodium sulfate, filtered and concentrated. The crude product was taken forward without further purification. LCMS (m/z) for C₉₈H₁₅₅N₁₁O₄₃PNa₂²⁺ (M+2Na)²⁺ 1125.5; retention time=0.71 min (UPLC 1.5 min method).

### Step 5: Example 29

[1835] The crude tris-benzyl ester 6-(benzyloxy)-6-oxohexyl 26-{[4,6-di-O-acetyl-2-(acetylamino)-2-deoxy-beta-D-galactopyranosyl]oxy}-5,9,16,22-tetraoxo-11,11-bis{[3-oxo-3-({3-[(5-{[3,4,6-tri-O-acetyl-2-(acetylamino)-2-deoxy-β-D-galactopyranosyl]oxy}pentanoyl)amino]propyl}amino)propoxy]methyl}-13-oxa 4,10,17,21-tetraazahexacos-1-yl phosphate (1.77 g, 0.790 mmol) was dissolved in methanol (0.05 M) and hydrogenated using an H-cube (10% Pd/C with a flow rate of 1.0 mL/min under full H₂ at 60° C.). Product was obtained cleanly and the bulk material was purified by preparatory HPLC [Column: Phenomenex Gemini XB C18 150 mm×3.0 mm 5 μm. Gradient conditions: mobile phase A=0.1% 10 mM triethylammonium acetate pH7 in water, mobile phase B=0.1% 10 mM triethylammonium acetate pH7 in acetonitrile (22-100-22% B/A, 27.0 mL/min)]. The bulk material was obtained as a white solid containing triethylammonium acetate (14 equiv. by ¹H NMR integration) (475 mg). The purity of the product was calculated to be 49 wt % and the yield was determined to be 233 mg (14%) ¹H NMR (600 MHz, CD₃OD) δ 5.34 (d, 3H), 5.07 (dd, 3H), 4.57 (d, 3H), 4.22-4.05 (m, 9H), 4.02 (t, 3H), 3.94-3.81 (m, 7H), 3.72-3.63 (m, 12H), 3.54 (dt, 3H), 3.35 (s, 6H), 3.26-3.20 (m, 17H), 3.19 (q, 84H, triethylammonium acetate), 2.43 (t, 6H), 2.30-2.17 (m, 13H), 2.14 (s, 9H), 2.03 (s, 9H), 1.95 (s, 9H), 1.93 (s, 9H), 1.93 (s, 42H, triethylammonium acetate), 1.90-1.78 (m, 4H), 1.74-1.57 (m, 22H), 1.49-1.38 (m, 2H), 1.30 (t, 126H). LCMS (m/z) for C₉₃H₁₅₄N₁₁O₄₄P²⁺ (M+2H)²⁺ 1080.5; retention time: 0.65 min (UPLC 1.5 min method).

### 18-{[27-({(2R,3R,4R,5R,6R)-3-(acetylamino)-4,5-bis(acetyloxy)-6-[(acetyloxy)methyl]tetrahydro-2H-pyran-2-yl}oxy)-12,12-bis({3-[(3-{[5-({(2R,3R,4R,5R,6R)-3-(acetylamino)-4,5-bis(acetyloxy)-6-[(acetyloxy)methyl]tetrahydro-2H-pyran-2-yl}oxy)pentanoyl]amino}propyl)amino]-3-oxopropoxy}methyl)-6,10,17,23-tetraoxo-14-oxa-5,11,18,22-tetraazaheptacosan-1-oyl]amino}-43-carboxy-18-(25-carboxy-19,19-dioxido-5-oxo-2,9,12,15,18,20-hexaoxa-6-aza-19-λ-5˜-phosphapentacos-1-yl)-37,37-dioxido-13,23-dioxo-3,6,9,16,20,27,30,33,36,38-decaoxa-12,24-diaza-37-λ˜5˜-phosphatritetracont-1-yl 5-carboxypentyl phosphate

[chemical structure]

### Reaction Scheme:

[chemical structure]

[chemical structure]

### Step 1: Benzyl 6-(((2-(2-(2-(2-aminoethoxy)ethoxy)ethoxy)ethoxy)(2-cyanoethoxy)phosphoryl)oxy)hexanoate

[1838] This compound was prepared from tert-butyl (2-(2-(2-(2-hydroxyethoxy)ethoxy)ethoxy)ethyl)carbamate (6.03 g, 20.5 mmol) and 2-cyanoethyl-N,N-diisopropylchlorophosphoramidite (6.87 mL, 30.8 mmol) and 6-Hydroxyhexanoate (6.85 g, 30.8 mmol) in an analogous manner to Example 29, Step 2. The title compound was obtained after purification by silica gel flash chromatography (50-100% ethyl acetate in heptane then 5% methanol in ethyl acetate) as a yellow oil (8.64 g, 67% over three steps). ¹H NMR (400 MHz, CDCl₃) δ ppm 7.40-7.31 (m, 5H), 5.11 (s, 2H), 5.04 (s, 1H), 4.31-4.15 (m, 4H), 4.08 (q, 2H), 3.71 (ddd, 2H), 3.69-3.58 (m, 8H), 3.53 (t, 2H), 3.31 (q, 2H), 2.77 (t, 2H), 2.37 (t, 2H), 1.76-1.63 (m, 4H), 1.44 (s, 9H), 1.48-1.36 (m, 2H). LCMS (m/z) for C₂₉H₄₇N₂NaO₁₁P⁺ (M+Na)⁺ 653.5; retention time=0.93 min (UPLC 1.5 min method).

### Step 2: 2-(2-(2-(2-((((6-(Benzyloxy)-6-oxohexyl)oxy)(2-cyanoethoxy)phosphoryl)oxy)ethoxy)ethoxy)ethoxy)ethan-1-aminium chloride

[1839] To a solution of benzyl 6-(((2-(2-(2-(2-aminoethoxy)ethoxy)ethoxy)ethoxy)(2-cyanoethoxy)phosphoryl)oxy) hexanoate (8.64 g, 14.1 mmol) in 1,4-dioxane (33 mL) at 0° C. was added a solution of hydrochloric acid (4 M in 1,4-dioxane, 87 mL, 348 mmol). The resulting mixture was stirred at ambient temperature for 1 h. The solvent was removed in vacuo to yield 8.76 g (>100%) title compound as a yellow oil. The crude product was used without further purification. ¹H NMR (400 MHz, CD₃OD) δ ppm 7.45-7.26 (m, 5H), 5.12 (s, 2H), 4.29-4.19 (m, 4H), 4.12 (q, 2H), 3.79-3.69 (m, 4H), 3.67 (m, 8H), 3.13 (t, 2H), 2.88 (ddd, 2H), 2.41 (t, 2H), 1.81-1.59 (m, 4H), 1.51-1.37 (m, 2H). LCMS (m/z) for C₂₄H₄₀N₂O₉P⁺ (M+H)⁺ 531.5; retention time=0.70 min (UPLC 1.5 min method).

### Step 3: Pentafluorophenyl 4-[(tert-butoxycarbonyl)amino]butanoate

[1840] To a solution of 4-(tert-butoxy carbonylamino)butyric acid (12.0 g, 59.0 mmol) in dichloromethane was added N,N-diisopropylethylamine (20.6 mL, 118 mmol) at ambient temperature followed by pentafluorophenyl trifluoroacetate (12.2 mL, 70.9 mmol) at 0° C. The reaction mixture was warmed to ambient temperature and stirred for 17 h. The reaction mixture was then concentrated. Purification of the crude material by silica gel flash chromatography (10-60% ethyl acetate in heptane) afforded the title compound as a white solid (19.1 g, 88%). ¹H NMR (400 MHz, CDCl₃) δ ppm 4.65 (s, 1H), 3.25 (q, 2H), 2.72 (t, 2H), 1.96 (p, 2H), 1.45 (s, 9H). LCMS (m/z) for C₁₅H₁₆F₅NNaO₄⁺ (M+Na)⁺ 392.3; retention time=1.01 min (UPLC 1.5 min method).

### Step 4: tert-Butyl 11,11-bis[(3-tert-butoxy-3-oxopropoxy)methyl]-2,2-dimethyl-4,9-dioxo-3,13-dioxa-5,10-diazahexadecan-16-oate

[1841] N,N-diisopropylethylamine (13.0 g, 101 mmol, 17.6 mL) was added to a solution of pentafluorophenyl 4-[(tert-butoxycarbonyl)amino]butanoate (9.68 g, 26.2 mmol) in THF (25 mL). tert-Butyl 3-{2-amino-3-(3-tert-butoxy-3-oxopropoxy)-2-[(3-tert-butoxy-3-oxopropoxy)methyl]propoxy}propanoate¹ (10.2 g, 20.2 mmol) was then added to the reaction in a slow stream as a solution in THF (50 mL) and the reaction was stirred at 50° C. for 78 h. The reaction was concentrated and purified twice by silica gel chromatography (0-20% methanol in dichloromethane and again 0-100% ethyl acetate in heptane) to afford the title compound as a colorless oil (13.3 g, 95%). ¹H NMR (400 MHz, CDCl₃) δ ppm 6.27-6.13 (m, 1H), 5.02-4.84 (m, 1H), 3.70 (s, 6H), 3.64 (t, 6H), 3.16 (q, 2H), 2.45 (t, 6H), 2.20 (t, 2H), 1.78 (quin, 2H), 1.45 (s, 36H). ¹ This compound was prepared according to a reported literature procedure: Cardonna, C. M.; Gawley, R. E. J. Org. Chem. 2002, 67, 1411.

### Step 5: 11,11-bis[(2-carboxyethoxy)methyl]-2,2-dimethyl-4,9-dioxo-3,13-dioxa-5,10-diazahexadecan-16-oic acid

[1842] Trifluoroacetic acid (46 g, 0.40 mol, 30 mL) was added to a solution of tert-butyl 11,11-bis[(3-tert-butoxy-3-oxopropoxy)methyl]-2,2-dimethyl-4,9-dioxo-3,13-dioxa-5,10-diazahexadecan-16-oate (13.3 g, 19.2 mmol) dichloromethane (100 mL) and the resulting solution was stirred at room temperature. After 20 h, the reaction mixture was concentrated. The resultant residue was then suspended in a mixture of tetrahydrofuran (30 mL) and saturated aqueous sodium bicarbonate (160 mL) to which was added di-tert-butyl dicarbonate (12.6 g, 57.7 mmol). The resultant suspension was heated to 40° C. Two additional aliquots of di-tert-butyl dicarbonate (3.70 g, 17.0 mmol each), were added to the reaction mixture, one at 30 min and then second at 90 min and the reaction was allowed to stir at 40° C. After 20 h, the reaction mixture was washed once with ethyl acetate and the wash was discarded. The pH of the aqueous layer was adjusted to pH=3 with 1 N hydrochloric acid. The aqueous layer was then extracted with ethyl acetate (×2) and the combined extracts were dried over magnesium sulfate, filtered, and concentrated to afford the title compound as a colorless oil which was used in the subsequent step without purification. ¹H NMR (400 MHz, CD₃OD) δ ppm 4.45-4.30 (m, 12H), 3.70 (q, 2H), 3.23 (t, 6H), 2.84 (t, 2H), 2.34 (quin, 2H), 2.18 (s, 9H).

### Step 6: Pentafluorophenyl 3-(2-[(4-aminobutanoyl)amino]-3-[3-oxo-3-(pentafluorophenoxy)propoxy]-2-{[3-oxo-3-(pentafluorophenoxy)propoxy]methyl}propoxy)propanoate

[1843] N,N-diisopropylethylamine (17.0 g, 132 mmol, 23.0 mL) was added to a solution of 11,11-bis[(2-carboxyethoxy)methyl]-2,2-dimethyl-4,9-dioxo-3,13-dioxa-5,10-diazahexadecan-16-oic acid (7.49 g, 13.0 mmol) in N,N-dimethylformamide (100 mL). Pentafluorophenyl trifluoroacetate (20.4 g, 72.7 mmol, 12.5 mL) was then added to the reaction mixture dropwise over 15 min resulting in a light pink solution that turned yellow over time. After 1 h, the reaction was quenched with saturated sodium bicarbonate. The resultant mixture was extracted with ethyl acetate (×2). The combined organic extracts were washed with brine, dried over sodium sulfate, filtered, and concentrated. The resultant residue was purified by silica gel chromatography (0-80% ethyl acetate in heptane) to afford the title compound as a colorless oil (8.76 g, 63% over 2 steps). ¹H NMR (400 MHz, (CD₃)₂SO) δ ppm 7.10 (s, 1H), 6.73 (t, 1H), 3.70 (t, 6H), 3.64 (s, 6H), 2.98 (t, 6H), 2.87 (q, 2H), 2.03 (t, 2H), 1.53 (quin, 2H), 1.36 (s, 9H).

### Step 7: Dibenzyl 27-({4-[(tert-butoxycarbonyl)amino]butanoyl}amino)-8,46-bis(2-cyanoethoxy)-27-[19-(2-cyanoethoxy)-19-oxido-5,26-dioxo-28-phenyl-2,9,12,15,18,20,27-heptaoxa-6-aza-19-λ˜5˜-phosphaoctacos-1-yl]-22,32-dioxo-7,9,12,15,18,25,29,36,39,42,45,47-dodecaoxa-21,33-diaza-8,46-diphosphatripentacontane-1,53-dioate 8,46-dioxide

[1844] Both of the starting materials were azeotroped with toluene twice and placed under high vacuum overnight prior to use. To a solution of pentafluorophenyl 3-(2-[(4-aminobutanoyl)amino]-3-[3-oxo-3-(pentafluorophenoxy)propoxy]-2-{[3-oxo-3-(pentafluorophenoxy) propoxy]methyl}propoxy)propanoate (3.97 g, 3.89 mmol) in dichloromethane (15 mL) was added N,N-diisopropylethylamine (6.8 mL, 39 mmol). Then a solution of 2-(2-(2-(2-((((6-(Benzyloxy)-6-oxohexyl)oxy)(2-cyanoethoxy)phosphoryl)oxy)ethoxy)ethoxy)ethoxy)ethan-1-aminium chloride (8.76 g crude, 14.0 mmol) in dichloromethane (25 mL) was added at 0° C. The reaction mixture was warmed to ambient temperature and stirred until TLC analysis showed consumption of starting material (15 h). The solvent was removed in vacuo, and the residue was redissolved in ethyl acetate. The solution was washed with water, saturated sodium bicarbonate and then water again, and the combined aqueous layers were extracted with ethyl acetate once. The combined organic extracts were dried with magnesium sulfate, filtered and concentrated in vacuo. The crude material was purified by silica gel flash chromatography (0-22% methanol in dichloromethane) to afford the title compound as a colorless gum (3.23 g, 40%). ¹H NMR (400 MHz, CDCl₃) δ ppm 7.38-7.30 (m, 15H), 6.71 (s, 3H), 6.52 (s, 1H), 5.19 (t, 1H), 5.11 (s, 6H), 4.32-4.14 (m, 12H), 4.08 (q, 6H), 3.76-3.60 (m, 42H), 3.55 (t, 6H), 3.43 (q, 6H), 3.14 (dd, 2H), 2.77 (t, 6H), 2.42 (t, 6H), 2.38 (t, 6H), 2.23 (t, 2H), 1.79-1.64 (m, 14H), 1.46-1.38 (m, 15H). LCMS (m/z) for C₉₄H₁₅₁F₅N₈O₃₆P₃²⁺ (M+2H)²⁺ 1031.0; retention time=1.00 min (UPLC 1.5 min method).

### Step 8: 29-[(4-Ammoniobutanoyl)amino]-29-(19,19-dioxido-5,26-dioxo-28-phenyl-2,9,12,15,18,20,27-heptaoxa-6-aza-19-λ˜5˜-phosphaoctacos-1-yl)-10,10-dioxido-3,24,34-trioxo-1-phenyl-2,9,11,14,17,20,27,31,38,41,44-undecaoxa-23,35-diaza-10-λ˜5˜-phosphahexatetracontan-46-yl 6-(benzyloxy)-6-oxohexyl phosphate. To a solution of dibenzyl 27-({4-[(tert-butoxycarbonyl)amino]butanoyl}amino)-8,46-bis(2-cyanoethoxy)-27-[19-(2-cyanoethoxy)-19-oxido-5,26-dioxo-28-phenyl-2,9,12,15,18,20,27-heptaoxa-6-aza-19-λ˜-5˜-phosphaoctacos-1-yl]-22,32-dioxo-7,9,12,15,18,25,29,36,39,42,45,47-dodecaoxa-21,33-diaza-8,46-diphosphatripentacontane-1,53-dioate 8,46-dioxide (3.22 g, 1.56 mmol) in 1,4-dioxane (18 mL) at 0° C. was added a solution of hydrochloric acid (4 M in 1,4-dioxane, 16 mL, 63 mmol). The resulting mixture was stirred at ambient temperature for 1 h. The solvent was then removed to provide an oily residue. This crude was suspended in acetonitrile (18 mL) and triethylamine (12 mL, 86 mmol) was added. The reaction mixture was stirred at ambient temperature for 40 h and subsequently concentrated in vacuo. The crude material was purified by reverse phase HPLC with a Phenomenex NX-C18 column (5-100% acetonitrile in water, containing 0.1% sodium hydroxide) and lyophilized to provide the title compound as a colorless oil (1.33 g, 47% over two steps). ¹H NMR (400 MHz, CD₃OD) δ ppm 7.41-7.27 (m, 15H), 5.11 (s, 6H), 4.03-3.92 (m, 6H), 3.85 (q, 6H), 3.71-3.58 (m, 42H), 3.55 (t, 6H), 3.38 (t, 6H), 2.99 (t, 2H), 2.44 (t, 6H), 2.42-2.29 (m, 8H), 1.92 (p, 2H), 1.72-1.57 (m, 12H), 1.48-1.37 (m, 6H). LCMS (m/z) for C₈₀H₁₃₄N₅O₃₄P3²⁺ (M+2H)²⁺ 901.5; retention time=0.77 min (UPLC 1.5 min method)

### Step 9: 29-{[27-({(2R,3R,4R,5R,6R)-3-(acetylamino)-4,5-bis(acetyloxy)-6-[(acetyloxy)methyl]tetrahydro-2H-pyran-2-yl}oxy)-12,12-bis({3-[(3-{[5-({(2R,3R,4R,5R,6R)-3-(acetylamino)-4,5-bis(acetyloxy)-6-[(acetyloxy)methyl]tetrahydro-2H-pyran-2-yl}oxy)pentanoyl]amino}propyl)amino]-3-oxopropoxy}methyl)-6,10,17,23-tetraoxo-14-oxa-5,11,18,22-tetraazaheptacosan-1-oyl]amino}-29-(19,19-dioxido-5,26-dioxo-28-phenyl-2,9,12,15,18,20,27-heptaoxa-6-aza-19-λ˜5˜-phosphaoctacos-1-yl)-10,10-dioxido-3,24,34-trioxo-1-phenyl-2,9,11,14,17,20,27,31,38,41,44-undecaoxa-23,35-diaza-10-λ˜5˜-phosphahexatetracontan-46-yl 6-(benzyloxy)-6-oxohexyl phosphate

[1845] Both of the starting materials were azeotroped with toluene three times and placed under high vacuum overnight before use. To a solution of the amine 29-[(4-ammoniobutanoyl)amino]-29-(19,19-dioxido-5,26-dioxo-28-phenyl-2,9,12,15,18,20,27-heptaoxa-6-aza-19-λ˜5˜-phosphaoctacos-1-yl)-10,10-dioxido-3,24,34-trioxo-1-phenyl-2,9,11,14,17,20,27,31,38,41,44-undecaoxa-23,35-diaza-10-λ˜5˜-phosphahexatetracontan-46-yl 6-(benzyloxy)-6-oxohexyl phosphate (270 mg, 0.147 mmol) in anhydrous dimethylformamide (0.5 mL) was added 18,18-bis(17-((1S,2R,3R,4R,5S)-4-acetamido-2,3-dihydroxy-6,8-dioxabicyclo[3.2.1]octan-1-yl)-5,11-dioxo-2,16-dioxa-6,10-diazaheptadecyl)-1-((1S,2R,3R,4R,5S)-4-acetamido-2,3-dihydroxy-6,8-dioxabicyclo[3.2.1]octan-1-yl)-′7,13,20-trioxo-2,16-dioxa-8,12,19-triazatetracosan-24-oic acid (337 mg, 0.177 mmol) in dimethylformamide (1.5 mL), N,N-diisopropylethylamine (0.21 mL, 1.18 mmol) and then Propylphosphonic anhydride solution (50 wt. % in ethyl acetate, 0.26 mL, 0.44 mmol). The reaction mixture was stirred at 50° C. for 17 h. Upon cooling to ambient temperature, water was added and the mixture was extracted with 85:15 CH₂Cl₂:i-PrOH (100 mL×3). The organic extracts were dried over sodium sulfate, filtered and concentrated in vacuo. The crude material was purified by reverse phase HPLC with a Phenomenex NX-C18 column (35-100 acetonitrile in water, containing 10 mM triethylammonium acetate) and freeze dried to provide 202 mg of the desired product containing triethylammonium acetate (12.3 equiv. based on ¹H NMR integration). The purity of this product was calculated to be 66 wt % and the yield was determined to be 133 mg (24%). This material was used in the next step without further purification. ¹H NMR (400 MHz, CD₃OD) δ ppm 7.43-7.24 (m, 15H), 5.33 (d, 3H), 5.11 (s, 6H), 5.07 (dd, 3H), 4.57 (d, 3H), 4.22-3.80 (m, 25H), 3.75-3.57 (m, 59H), 3.57-3.47 (m, 12H), 3.41-3.34 (m, 12H), 3.20 (q, 74H, triethylammonium acetate), 2.48-2.35 (m, 18H), 2.27-2.17 (m, 12H), 2.14 (s, 9H), 2.02 (s, 9H), 1.96, (s, 111H, triethylammonium acetate) 1.95 (s, 9H), 1.93 (s, 9H), 1.77-1.54 (m, 33H), 1.44 (m 9H), 1.31 (t, 111H, triethylammonium acetate). LCMS (m/z) for C₁₆₄H₂₆₆N₁₅O₇₂P₃²⁺ (M+2H)²⁺ 1845.8; retention time=1.07 min (UPLC 3 min method).

### Step 10: Example 30

[1846] A mixture of 29-{[27-({2R,3R,4R,5R,6R)-3-(acetylamino)-4,5-bis(acetyloxy)-6-[(acetyloxy)methyl]tetrahydro-2H-pyran-2-yl}oxy)-12,12-bis({3-[(3-{[5-({(2R,3R,4R,5R, 6R)-3-(acetylamino)-4,5-bis(acetyloxy)-6-[(acetyloxy)methyl]tetrahydro-2H-pyran-2-yl}oxy)pentanoyl]amino}propyl)amino]-3-oxopropoxy}methyl)-6,10,17,23-tetraoxo-14-oxa-5,11,18,22-tetraazaheptacosan-1-oyl]amino}-29-(19,19-dioxido-5,26-dioxo-28-phenyl-2,9,12,15,18,20,27-heptaoxa-6-aza-19-λ˜5˜-phosphaoctacos-1-yl)-10,10-dioxido-3,24,34-trioxo-1-phenyl-2,9,11,14,17,20,27,31,38,41,44-undecaoxa-23,35-diaza-10-5-phosphahexatetracontan-46-yl 6-(benzyloxy)-6-oxohexyl phosphate (200 mg, 0.0330 mmol, 66 wt %) and 10% palladium on carbon (7.0 mg, 0.0066 mmol) in methanol (2 mL) was stirred under hydrogen pressure (50 psi) at 25° C. for 20 h. The catalyst was filtered through 0.45 um nylon acrodisc, and washed with methanol (40 mL). The filtrate was then concentrated and the resulting oil was dissolved in 1:1 mixture of acetonitrile and water (22 mL), adjusted to pH 5.70 by hydrochloric acid (1 N). The solution was lyophilized overnight to afford the title compound as a hygroscopic white solid (13 equiv triethylamine hydrochloride salt) (110 mg, 59%). ¹H NMR (600 MHz, CD₃OD) δ ppm 5.34 (d, 3H), 5.07 (dd, 3H), 4.57 (d, 3H), 4.20-3.91 (m, 14H), 3.93-3.84 (m, 9H), 3.75-3.62 (m, 63H), 3.60-3.50 (m, 10H), 3.43-3.35 (m, 8H), 3.27-3.14 (m, 80H, triethylamine hydrochloride), 3.12-2.90 (m, 2H), 2.57-2.38 (m, 12H), 2.30-2.20 (m, 18H), 2.14 (s, 9H), 2.03 (s, 9H), 1.95-1.94 (m, 18H), 1.89-1.83 (m, 1H), 1.73-1.55 (m, 34H), 1.46-1.40 (m, 9H), 1.31 (t, 120H, triethylamine hydrochloride). LCMS (m/z) for C₁₄₃H₂₄₉N₁₅O₇₂P₃³⁺ (M+3H)³⁺ 1141.2; retention time=1.06 min (UPLC 3 min method).

### 1-[(1S,2R,3R,4R,5S)-4-(acetylamino)-2,3-bis(acetyloxy)-6,8-dioxabicyclo[3.2.1]oct-1-yl]-18,18-bis{17-[(1S,2R,3R,4R,5S)-4-(acetylamino)-2,3-bis(acetyloxy)-6,8-dioxabicyclo[3.2.1]oct-1-yl]-5,11-dioxo-2,16-dioxa-6,10-diazaheptadec-1-yl}-7,13,20-trioxo-2,16-dioxa-8,12,19-triazahentriacontan-31-oic acid

[chemical structure]

### Synthetic Scheme:

[chemical structure]

### Step 1: tert-Butyl 5-iodopentanoate

[1849] To a solution of tert-butyl 5-bromopentanoate (60.0 g, 250 mmol) in acetone (400 mL) was added sodium iodide (94.8 g, 633 mmol). The reaction mixture was stirred at 57° C. for 4 h, cooled to room temperature, filtered and washed with dichloromethane. The solvent was evaporated under reduced pressure to give a residue which was dissolved dichloromethane, washed with saturated sodium bicarbonate (200 mL) and brine (100 mL). The separated organic phase was dried over sodium sulfate, filtered, and concentrated to afford the title compound as a yellow oil (69.3 g, 100%). ¹H NMR (600 MHz, CDCl₃) δ ppm 3.20 (t, 2H), 2.25 (t, 2H), 1.86 (p, 2H), 1.70 (p, 2H), 1.45 (s, 9H).

### Step 2: tert-Butyl 5-{[(1S,2R,6R,7R,8S)-7-(acetylamino)-4,4-dimethyl-3,5,9,11-tetraoxatricyclo[6.2.1.0˜2,6˜]undec-1-yl]methoxy}pentanoate

[1850] To a solution of tert-butyl 5-iodopentanoate (59 g, 0.21 mol) and N-((3aR,4S,7S,8R,8aR)-4-(hydroxymethyl)-2,2-dimethylhexahydro-4,7-epoxy[1,3]dioxolo[4,5-d]oxepin-8-yl)acetamide (20 g, 69 mmol) in dichloromethane (210 mL) was added tetrabutylammonium hydrogensulfate (35.3 g, 104 mmol) followed by 12.5 M sodium hydroxide solution (160 mL) in an ice bath. The reaction mixture was stirred at room temperature for 24 h. The reaction mixture was partitioned between dichloromethane (200 mL) and water (200 mL). The separated organic phase was washed by 1 N hydrochloric acid (300 mL), dried over sodium sulfate, filtered, and concentrated. The crude was triturated in diethyl ether (500 mL) at ambient temperature for 30 min. The resultant solid was removed by filtration and the filter cake was rinsed by diethyl ether (100 mL). The filtrate was concentrated, and dried in vacuo overnight to afford the crude of the title compound as a yellow oil (50.9 g, 45.5 wt % pure determined by qNMR with 1,3,5-trimethoxyben as the internal standard) which was used in next step without purification. LCMS (m/z) for C₂₁H₃₆NO₈⁺ (M+H)⁺ 430.3; retention time=0.88 min (UPLC 1.5 min method).

### Step 3: tert-Butyl 5-{[(1S,2R,3R,4R,5S)-4-(acetylamino)-2,3-dihydroxy-6,8-dioxabicyclo[3.2.1]oct-1-yl]methoxy}pentanoate

[1851] To an ice cold solution of the crude of tert-butyl 5-{[(1S,2R,6R,7R,8S)-7-(acetylamino)-4,4-dimethyl-3,5,9,11-tetraoxatricyclo[6.2.1.0˜2,6˜]undec-1-yl]methoxy}pentanoate (50.9 g, 45.5 wt %, 53.9 mmol) in tetrahydrofuran (105 mL) was added a solution of concentrated hydrochloric acid (16 mL) in water (49 mL) via addition funnel over 5 min. The reaction solution was stirred at room temperature under nitrogen for 6 h. The reaction mixture was diluted with 2-methyl-tetrahydrofuran (300 mL) and washed with brine (100 mL). The aqueous phase was extracted with dichloromethane (300 mL). Each separated organic phase was washed by a mixture of saturated sodium bicarbonate (75 mL) and brine (75 mL), then brine (120 mL). The organic phases were combined, dried over sodium sulfate, filtered, concentrated, and azeotroped by heptane (100 mL) followed by methyl-t-butyl-ether (100 mL). The resulting crude was triturated in methyl-t-butyl-ether (200 mL) at room temperature for 15 min. The resulting precipitate was collected by filtration, rinsed with methyl-t-butyl-ether (200 mL), and dried in vacuo to afford the title compound as white solid (17.9 g, 66% over 2 steps). ¹H NMR (400 MHz, CDCl₃) δ ppm 5.79 (d, 1H), 5.36 (d, 1H), 4.07-3.88 (m, 4H), 3.79-3.62 (m, 4H), 3.60-3.46 (m, 2H), 3.37 (d, 1H), 2.30-2.19 (m, 2H), 2.07 (s, 3H), 1.75-1.51 (m, 4H), 1.45 (s, 9H). LCMS (m/z) for C₁₈H₃₂NO₈⁺ (M+H)⁺ 390.5; retention time=0.70 min (UPLC 1.5 min method).

### Step 4: tert-Butyl 5-{[(1S,2R,3R,4R,5S)-4-(acetylamino)-2,3-bis(acetyloxy)-6,8-dioxabicyclo[3.2.1]oct-1-yl]methoxy}pentanoate

[1852] Acetic anhydride (18.7 g, 183 mmol) was added dropwise to an ice cold solution of tert-butyl 5-{[(1S,2R,3R,4R,5S)-4-(acetylamino)-2,3-dihydroxy-6,8-dioxabicyclo[3.2.1]oct-1-yl]methoxy}pentanoate (18.6 g, 49.7 mmol) and pyridine (14.0 g, 183 mmol), and dimethylaminopyridine (1.12 g, 9.16 mmol) in dichloromethane (150 mL). The mixture was stirred at room temperature for 2.5 h. The reaction mixture was quenched by hydrochloric acid (1 N, 150 mL) and extracted with dichloromethane (200 mL). The organic phase was washed with hydrochloric acid (1 N, 150 mL), saturated sodium bicarbonate (150 mL) dried over sodium sulfate, concentrated, and azeotroped with heptane (4×100 mL) to the crude which was purified by a silica gel plug (210 g silica gel, 100% heptane (1 L), then 25% ethyl acetate in heptane (2 L), followed by 100% ethyl acetate (2 L)) to afford the title compound as white solid (21.2 g, 98%). ¹H NMR (400 MHz, CDCl₃) δ ppm 5.65 (d, 1H), 5.41-5.39 (m, 2H), 5.09 (dd, 1H), 4.34 (t, 1H), 3.93 (d, 1H), 3.75 (d, 1H), 3.65 (d, 1H), 3.50 (d, 1H), 3.45 (td, 1H), 3.38 (td, 1H), 2.21 (t, 2H), 2.17 (s, 3H), 2.00 (s, 3H), 1.98 (s, 3H), 1.64-1.52 (m, 4H), 1.44 (s, 9H). LCMS (m/z) for C₂₂H₃₅NNaO₁₀⁺ (M+Na)⁺ 496.1; retention time=0.85 min (UPLC 1.5 min method).

### Step 5: 5-{[(1S,2R,3R,4R,5S)-4-(acetylamino)-2,3-bis(acetyloxy)-6,8-dioxabicyclo[3.2.1]oct-1-yl]methoxy}pentanoic acid

[1853] To a solution of tert-butyl 5-{[(1S,2R,3R,4R,5S)-4-(acetylamino)-2,3-bis(acetyloxy)-6,8-dioxabicyclo[3.2.1]oct-1-yl]methoxy}pentanoate (21.1 g, 44.6 mmol) in dichloromethane (110 mL) placed in an ice bath was added hydrochloric acid (11 g, 0.31 mol, 78 mL, 4.0 M in 1,4-dioxane). The cooling bath was removed and the reaction was stirred at ambient temperature under nitrogen for 4 h. The reaction mixture was concentrated, and azeotroped with diethyl ether (200 mL), ethyl acetate (200 mL), and heptane (3×200 mL), and finally dried by vacuum overnight to afford the title compound as a white solid (18.6 g, quantitative). ¹H NMR (400 MHz, CD₃CN) δ ppm 8.84 (br.s., 1H), 6.50 (d, 1H), 5.35 (d, 1H), 5.30 (d, 1H), 5.00 (dd, 1H), 4.17-4.07 (m, 1H), 3.93 (d, 1H), 3.78-3.56 (m, 2H), 3.52 (d, 1H), 3.49-3.34 (m, 2H), 2.26 (t, 2H), 2.12 (s, 3H), 1.92 (s, 3H), 1.85 (s, 3H), 1.60-1.47 (m, 4H). LCMS (m/z) for C₁₈H₂₈NO₁₀⁺ (M+H)⁺ 418.0; retention time=0.60 min (UPLC 1.5 min method).

### Step 6: Benzyl 1-[(1S,2R,3R,4R,5S)-4-(acetylamino)-2,3-bis(acetyloxy)-6,8-dioxabicyclo[3.2.1]oct-1-yl]-18,18-bis{17-[(1S,2R,3R,4R,5S)-4-(acetylamino)-2,3-bis(acetyloxy)-6,8-dioxabicyclo[3.2.1]oct-1-yl]-5,11-dioxo-2,16-dioxa-6,10-diazaheptadec-1-yl}-7,13,20-trioxo-2,16-dioxa-8,12,19-triazahentriacontan-31-oate

[1854] To a solution of 5-{[(1S,2R,3R,4R,5S)-4-(acetylamino)-2,3-bis(acetyloxy)-6,8-dioxabicyclo[3.2.1]oct-1-yl]methoxy}pentanoic acid (1.53 g, 3.63 mmol) in acetonitrile (6 mL) was added 1,1′-carbonyldiimidazole (0.580 g, 3.56 mmol) and the reaction mixture was stirred at room temperature. After 3 h, benzyl 12-((1,19-diamino-10-((3-((3-aminopropyl)amino)-3-oxopropoxy)methyl)-5,15-dioxo-8,12-dioxa-4,16-diazanonadecan-10-yl)amino)-12-oxododecanoate tris-trifluoroacetate salt (1.58 g, 1.03 mmol, 75.4 wt %) was added to the reaction mixture as a solution in acetonitrile (6 mL) followed by N,N-diisopropylethylamine (0.540 g, 4.14 mmol). The reaction mixture was stirred at room temperature overnight. The reaction mixture was concentrated, diluted by dichloromethane (70 mL), washed by hydrochloric acid (1 N, 30 mL), brine (30 mL), and saturated sodium bicarbonate (30 mL). The organic phase was dried over sodium sulfate, filtered, and concentrated. The resultant residue was purified by a silica gel plug (20 g silica gel, eluted with dichloromethane (100 mL), 10% methanol in dichloromethane (200 mL), followed by 25% methanol in dichloromethane (200 mL)) to afford the title compound as a white glass (2.25 g, quantitative yield). ¹H NMR (600 MHz, CD₃OD) δ ppm δ 7.73-7.30 (m, 5H), 5.44 (d, 3H), 5.32 (s, 3H), 5.12-5.09 (m, 5H), 4.18 (d, 3H), 4.00 (d, 3H), 3.71 (dd, 6H), 3.68-3.67 (m, 12H), 3.51-3.45 (m, 6H), 3.41-3.38 (m, 3H), 3.21 (q, 12H), 2.42 (t, 6H), 2.35 (t, 2H), 2.22-2.17 (m, 6H), 2.16 (s, 9H), 1.94 (s, 18H), 1.72-1.58 (m, 16H), 1.58-1.42 (m, 8H), 1.38-1.29 (m, 12H). LCMS (m/z) for C₉₅H₁₅₀N₁₀O₃₆²⁺ (M+2H)²⁺ 1004.7; retention time=0.86 min (UPLC 3 min method)

### Step 7: Example 31

[1855] A mixture of benzyl 1-[(1S,2R,3R,4R,5S)-4-(acetylamino)-2,3-bis(acetyloxy)-6,8-dioxabicyclo[3.2.1]oct-1-yl]-18,18-bis{17-[(1S,2R,3R,4R,5S)-4-(acetylamino)-2,3-bis(acetyloxy)-6,8-dioxabicyclo[3.2.1]oct-1-yl]-5,11-dioxo-2,16-dioxa-6,10-diazaheptadec-1-yl}-7,13,20-trioxo-2,16-dioxa-8,12,19-triazahentriacontan-31-oate (2.36 g, 1.18 mmol) and 10% palladium on carbon (0.376 mg) in methanol (14 mL) was stirred under hydrogen pressure (50 psi) at 25° C. in a stirred Parr reactor for 4.5 h. The reaction mixture was filtered through celite to remove the catalyst. The celite was washed with methanol (20 mL) and the combined filtrates were concentrated and azeotroped with methyl tert-butyl ether (3×20 mL). The crude was triturated in methyl tert-butyl ether (20 mL) overnight. The resulting white solid was collected by filtration, dried in vacuo to afford the title compound as a white solid (2.14 g, 95%). ¹H NMR (600 MHz, CD₃OD) δ ppm 5.45 (d, 3H), 5.32 (s, 3H), 5.11 (dd, 3H), 4.18 (d, 3H), 4.01 (d, 3H), 3.72 (dd, 6H), 3.70-3.64 (m, 12H), 3.52-3.47 (m, 6H), 3.42-3.39 (m, 3H), 3.22 (q, 12H), 2.42 (t, 6H), 2.28 (t, 2H), 2.19 (t, 6H) 2.16 (s, 9H) 1.95 (s, 18H) 1.73-1.50 (m, 24H) 1.38-1.29 (m, 12H). LCMS (m/z) for C₈₈H₁₄₃N₁₀O₃₆⁺1916.2 (M+H)⁺; retention time=1.35 min (UPLC 3 min method).

### 1-[(1S,2R,3R,4R,5S)-4-(acetylamino)-2,3-bis(acetyloxy)-6,8-dioxabicyclo[3.2.1]oct-1-yl]-18-{17-[(1S,2R,3R,4R,5S)-4-(acetylamino)-2,3-bis(acetyloxy)-6,8-dioxabicyclo[3.2.1]oct-1-yl]-5,11-dioxo-2,16-dioxa-6,10-diazaheptadec-1-yl}-7,13,20-trioxo-2,16-dioxa-8,12,19-triazahentriacontan-31-oic acid

[chemical structure]

### Reaction Scheme:

[chemical structure]

[chemical structure]

### Step 1: di-tert-Butyl 3,3′-[(2-aminopropane-1,3-diyl)bis(oxy)]dipropanoate

[1858] 1,1-Dimethylethyl 2-propenoate (1.44 kg, 11.3 mol) was added to a stirred suspension of 2-amino-1,3-propanediol (500 g, 5.49 mol) in dimethylsulfoxide (1.5 L) dropwise over 1 hour at −5° C. The reaction mixture was then allowed to warm to 25° C. and stirring at that temperature continued until TLC analysis showed consumption of the starting material (16 h). The reaction mixture was diluted with water (3 L) and the mixture was extracted with ethyl acetate (5 L×1, 2.5 L×2). The combined organic layers were dried over sodium sulfate, filtered and concentrated in vacuo to afford a residue (1.30 kg). The crude was purified by column chromatography (5% ethyl acetate in petroleum ether then 10% methanol in dichloromethane) to afford the title compound as yellow oil (600 g, 31%). ¹H NMR (400 MHz, CDCl₃) δ ppm 3.69-3.60 (m, 4H), 3.45-3.37 (m, 2H), 3.29 (dd, 2H), 3.18-3.00 (m, 1H), 2.44 (t, 4H), 1.42 (s, 18H).

### Step 2: Methyl 12-oxo-12-[(2,2,16,16-tetramethyl-4,14-dioxo-3,7,11,15-tetraoxaheptadecan-9-yl)amino]dodecanoate

[1859] This reaction was carried out 2 batches in parallel. 1,12-Dodecanedioic acid monomethyl ester (128 g, 0.524 mmol), hydroxybenzotriazole (70.7 g, 0.524 mmol), diisopropylethylamine (271 g, 2.10 mol) and 1-(3-dimethylaminopropyl)-3-ethylcarbodiimide hydrochloride (201 g, 1.05 mol) were added in to a stirred solution of di-tert-Butyl 3,3′-[(2-aminopropane-1,3-diyl)bis(oxy)]dipropanoate (182 g, 0.524 mol) in dichloromethane (1.6 L) at 20° C. and the reaction was stirred at room temperature until TLC analysis showed consumption of starting material (12 h). The two batches of this reaction mixture were combined, diluted with water (2 L) and stirred at room temperature for 10 minutes. The organic layer was separated and dried over sodium sulfate, filtered and concentrated. The resultant crude residue was purified by silica gel chromatography (20-50% ethyl acetate in petroleum ether) to afford the title compound as a light yellow oil (500 g, 83%). ¹H NMR (400 MHz, CDCl₃) δ ppm 6.21 (d, 1H), 4.14-4.03 (m, 1H), 3.68-3.54 (m, 7H), 3.49 (dd, 2H), 3.32 (dd, 2H), 2.49-2.30 (m, 4H), 2.21 (t, 2H), 2.10 (t, 2H), 1.53 (br.s., 4H), 1.37 (s, 18H), 1.09-1.27 (m, 12H)

### Step 3: 3,3′-[{2-[(12-Methoxy-12-oxododecanoyl)amino]propane-1,3-diyl}bis(oxy)]dipropanoic acid

[1860] A solution of methyl 12-oxo-12-[(2,2,16,16-tetramethyl-4,14-dioxo-3,7,11,15-tetraoxaheptadecan-9-yl)amino]dodecanoate (546 g, 0.950 mol) in formic acid (2.5 L) was stirred at 30-35° C. until TLC analysis showed consumption of starting material (18 h). The mixture was concentrated to afford a crude residue which was triturated in petroleum ether/ethyl acetate (10:1, 1.5 L) at 20° C. for 12 h. The resultant slurry was filtrated and the filter cake was dried in vacuo to afford the title compound as a white solid (370 g, 84%). ¹H NMR (400 MHz, CDCl₃) δ ppm 10.02 (br.s., 2H), 6.33 (d, 1H), 4.27-4.16 (m, 1H), 3.73 (t, 4H), 3.66 (s, 3H), 3.59 (dd, 2H), 3.45 (dd, 2H), 2.59 (t, 4H), 2.30 (t, 2H), 2.20 (t, 2H), 1.66-1.53 (m, 4H), 1.26 (br.s., 12H).

### Step 4: Methyl 15-(13,13-dimethyl-5,11-dioxo-2,12-dioxa-6,10-diazatetradec-1-yl)-2,2-dimethyl-4,10,17-trioxo-3,13-dioxa-5,9,16-triazaoctacosan-28-oate

[1861] 1-(3-Dimethylaminopropyl)-3-ethylcarbodiimide hydrochloride (348 g, 1.82 mol), hydroxybenzotriazole (205 g, 1.52 mol), and diisopropylethylamine (470 g, 3.64 mol) were added to a stirred solution of 3,3′-[{2-[(12-methoxy-12-oxododecanoyl)amino]propane-1,3-diyl}bis(oxy)]dipropanoic acid (280 g, 0.606 mmol) in DCM/DMF (2 L/250 mL) at 0-5° C. tert-Butyl (3-aminopropyl)carbamate (243 g, 1.39 mol) was then added to the reaction mixture at 0-5° C. in 4 portions over 20 min. The reaction was then allowed to warm to 25° C. and stirring was continued at that temperature until TLC analysis showed consumption of the starting material (12 h). The reaction mixture was concentrated and the resultant residue diluted with water (2 L). Then the mixture was extracted with ethyl acetate (2 L×1, 700 mL×2) and the combined organic layers were dried over sodium sulfate, filtered and concentrated. The resultant residue was purified by silica gel chromatography (100% ethyl acetate followed by 10% methanol in dichloromethane) to afford a white solid which was triturated in petroleum ether/ethyl acetate (1:2, 1 L) at 15° C. After 16 h the slurry was filtered and the filter cake was washed with ethyl acetate (200 mL) and subsequently dried in vacuo. The resultant solid was once again was triturated in petroleum ether/ethyl acetate (1:3, 600 mL) at 15° C. for 24 h. The slurry was filtered and the filter cake was washed with ethyl acetate (200 mL). The cake was dried in vacuo to obtain the title compound as a white solid (190 g, 40%). ¹H NMR (400 MHz, (CD₃)₂SO) δ ppm 7.81 (t, 2H), 7.63 (d, 1H), 6.76 (t, 2H), 4.01-3.85 (m, 1H), 3.64-3.48 (m, 7H), 3.41-3.22 (m, 4H), 3.02 (q, 4H), 2.90 (q, 4H), 2.28 (t, 6H), 2.05 (t, 2H), 1.57-1.43 (m, 8H), 1.37 (s, 18H), 1.22 (br.s., 12H).

### Step 5: 15-(13,13-dimethyl-5,11-dioxo-2,12-dioxa-6,10-diazatetradec-1-yl)-2,2-dimethyl-4,10,17-trioxo-3,13-dioxa-5,9,16-triazaoctacosan-28-oic acid

[1862] A solution of lithium hydroxide monohydrate (35.7 g, 853 mmol) in water (400 mL) was added to a stirred solution of methyl 15-(13,13-dimethyl-5,11-dioxo-2,12-dioxa-6,10-diazatetradec-1-yl)-2,2-dimethyl-4,10,17-trioxo-3,13-dioxa-5,9,16-triazaoctacosan-28-oate (220 g, 284 mmol) in tetrahydrofuran (1.2 L) at 20° C. The reaction mixture was then heated to 28° C. until TLC analysis showed consumption of starting material (18 h). The reaction mixture was concentrated and the resultant residue was diluted with water (2 L). The mixture was then washed with dichloromethane (1 L×2) and was acidified with aqueous hydrochloric acid (1 N, 900 mL) to pH<4. The mixture was extracted with dichloromethane (1 L×2) and the combined organic layers were dried over sodium sulfate, filtered and concentrated to afford the title compound as a light yellow gum (190 g, 88%). ¹H NMR (400 MHz, (CD₃)₂SO) δ ppm 11.97 (br.s., 1H), 7.81 (t, 2H), 7.62 (d, 1H), 6.75 (t, 2H), 3.98-3.87 (m, 1H), 3.56 (t, 4H), 3.38-3.24 (m, 4H), 3.02 (q, 4H), 2.90 (q, 4H), 2.28 (t, 4H), 2.18 (t, 2H), 2.05 (t, 2H), 1.57-1.41 (m, 8H), 1.37 (s, 18H), 1.23 (br.s., 12H).

### Step 6: Benzyl 15-(13,13-dimethyl-5,11-dioxo-2,12-dioxa-6,10-diazatetradec-1-yl)-2,2-dimethyl-4,10,17-trioxo-3,13-dioxa-5,9,16-triazaoctacosan-28-oate

[1863] Potassium carbonate (107 g, 773 mmol) and benzyl bromide (52.9 g, 309 mmol) were added to a stirred solution of 15-(13,13-dimethyl-5,11-dioxo-2,12-dioxa-6,10-diazatetradec-1-yl)-2,2-dimethyl-4,10,17-trioxo-3,13-dioxa-5,9,16-triazaoctacosan-28-oic acid (196 g, 258 mmol) in N,N-dimethylformamide (800 mL) at 20° C. The reaction mixture was then heated to 35° C. until TLC analysis showed consumption of starting material (12 h). The mixture was diluted with water (1.5 L) and extracted with methyl tert-butyl ether (1 L×1, 500 mL×2). The combined organic layers were washed with 5% aqueous lithium chloride (800 mL×2), dried over sodium sulfate, filtered and concentrated. The resultant residue was first purified by silica gel chromatography (10% methanol in dichloromethane) and subsequently by preparative HPLC (prepL-LD, Phenomenex Luna C18 250*80 mm*10 um, 30-100% acetonitrile in water modified with 10 mM ammonium bicarbonate, 250 mL/min) to afford the title compound as a white solid (100 g, 46%). ¹H NMR (400 MHz, CDCl₃) δ ppm 7.41-7.28 (m, 5H), 6.86 (t, 2H), 6.61 (d, 1H), 5.21 (t, 2H), 5.11 (s, 2H), 4.26-4.14 (m, 1H), 3.81-3.72 (m, 2H), 3.72-3.63 (m, 2H), 3.58 (dd, 2H), 3.41 (dd, 2H), 3.36-3.24 (m, 4H), 3.16 (q, 4H), 2.52-2.38 (m, 4H), 2.35 (t, 2H), 2.19 (t, 2H), 1.68-1.55 (m, 8H), 1.43 (s, 18H), 1.34-1.20 (m, 12H).

### Step 7: Benzyl 12-[(1,3-bis{3-[(3-aminopropyl)amino]-3-oxopropoxy}propan-2-yl)amino]-12-oxododecanoate

[1864] A stirred solution of benzyl 15-(13,13-dimethyl-5,11-dioxo-2,12-dioxa-6,10-diazatetradec-1-yl)-2,2-dimethyl-4,10,17-trioxo-3,13-dioxa-5,9,16-triazaoctacosan-28-oate (5.0 g, 5.9 mmol) in dichloromethane (35 mL), was cooled in an ice bath. Trifluoroacetic acid (8.8 mL, 0.12 mol) was added drop-wise over 15 minutes. After an additional 15 minutes, the ice bath was removed and the reaction stirred at ambient temperature for 2 hours. The reaction was concentrated and acetonitrile (20 mL) was added. The solution was concentrated and dried on high vacuum pump overnight. The resulting oil was dissolved in dichloromethane (125 mL) and MP-Carbonate resin (Biotage) (18 g, 3.1 mmol/g) was added to free base the material. The mixture was stirred for 2.5 hours at ambient temperature under nitrogen. The resin was then filtered off and washed with dichloromethane (25 mL) followed by methanol (25 mL). The combined filtrates were concentrated and dried in vacuo overnight to afford the title compound as a white solid (4.1 g, quantitative). ¹H NMR (400 MHz, CD₃OD) δ ppm 7.40-7.28 (m, 5H), 5.11 (s, 2H), 4.17-4.06 (m, 1H), 3.70 (t, 4H), 3.46 (d, 4H), 3.30-3.28 (m, 4H, overlapping with methanol shift), 2.95 (t, 4H), 2.46 (t, 4H), 2.36 (t, 2H), 2.20 (t, 2H), 1.85 (m, 4H), 1.61 (d, 4H), 1.30 (br.s., 12H).

### Step 8: Pentafluorophenyl 5-{[(1S,2R,3R,4R,5S)-4-(acetylamino)-2,3-bis(acetyloxy)-6,8-dioxabicyclo[3.2.1]oct-1-yl]methoxy}pentanoate

[1865] To a solution of tert-butyl 5-{[(1S,2R,3R,4R,5S)-4-(acetylamino)-2,3-bis(acetyloxy)-6,8-dioxabicyclo[3.2.1]oct-1-yl]methoxy}pentanoate (0.990 g, 2.04 mmol) in dichloromethane (8 mL) placed in an ice bath was added trifluoroacetic acid (1.90 g, 170 mmol) and the reaction was stirred at ambient temperature under nitrogen overnight. Deprotection of ester was complete as confirmed by LCMS [(m/z) for C₁₈H₂₈NO10⁺ (M+H)⁺ 418.0]. The reaction mixture was cooled to 0° C. and 2,6-lutidine (2.18 g, 20.5 mmol) followed by pentafluorophenyl trifluoroacetate (0.86 g, 3.06 mmol mL) were added sequentially via addition funnel and the reaction mixture was stirred at ambient temperature. After 3 h, the reaction was quenched by addition of hydrochloric acid (1 N, 150 mL) and extracted with dichloromethane (200 mL). The organic phase was washed with hydrochloric acid (1 N, 3×150 mL) and saturated sodium bicarbonate (150 mL), then subsequently dried over sodium sulfate, filtered, and concentrated. The crude residue was purified by silica gel chromatography (25-75% ethyl acetate in heptane) to afford the title compound as white solid (1.03 g, 87%). ¹H NMR (600 MHz, CD₃CN) δ ppm 6.49 (d, 1H), 5.36 (d, 1H), 5.30 (s, 1H), 5.01 (dd, 1H), 4.10 (t, 1H), 3.94 (d, 1H), 3.69 (dd, 2H), 3.55-3.46 (m, 2H), 3.46-3.36 (m, 1H), 2.72 (t, 2H), 2.12 (s, 3H), 1.91 (s, 3H), 1.85 (s, 3H), 1.80-1.68 (m, 2H), 1.66-1.53 (m, 2H). LCMS (m/z) for C₂₄H₂₇F₅NO₁₀⁺ (M+H)⁺ 584.8; Retention time=0.94 min (UPLC 1.5 min method).

### Step 9: Benzyl 1-[(1S,2R,3R,4R,5S)-4-(acetylamino)-2,3-bis(acetyloxy)-6,8-dioxabicyclo[3.2.1]oct-1-yl]-18-{17-[(1S,2R,3R,4R,5S)-4-(acetylamino)-2,3-bis(acetyloxy)-6,8-dioxabicyclo[3.2.1]oct-1-yl]-5,11-dioxo-2,16-dioxa-6,10-diazaheptadec-1-yl}-7,13,20-trioxo-2,16-dioxa-8,12,19-triazahentriacontan-31-oate

[1866] To a suspension of benzyl 12-[(1,3-bis{3-[(3-aminopropyl)amino]-3-oxopropoxy}propan-2-yl)amino]-12-oxododecanoate (1.05 g, 1.31 mmol) in a mixture of acetonitrile (18 mL) and dimethylformamide (8 mL) was added N,N-diisopropylethylamine (1.83 ml, 10.5 mmol). The resultant mixture was then added to a solution of pentafluorophenyl 5-{[(1S,2R,3R,4R,5S)-4-(acetylamino)-2,3-bis(acetyloxy)-6,8-dioxabicyclo[3.2.1]oct-1-yl]methoxy}pentanoate (1.75 g, 3.00 mmol) in acetonitrile (5 mL) and the reaction was stirred under nitrogen at ambient temperature for 2 hours. The reaction was then diluted with 1 N hydrochloric acid (50 ml) and extracted with dichloromethane (2×125 mL). The combined dichloromethane extracts were dried over sodium sulfate, filtered and concentrated. The resultant residue was purified by column chromatography (20-100% ethyl acetate in heptane and then 0-30% methanol in dichloromethane) to afford the title compound as a white solid (1.71 g, 89%). ¹H NMR (600 MHz, CD₃OD) δ ppm 7.37-7.28 (m, 5H), 5.46 (d, 2H), 5.34 (s, 2H), 5.17-5.07 (m, 4H), 4.20 (d, 2H), 4.15-4.09 (m, 1H), 4.02 (d, 2H), 3.67-3.79 (m, 8H), 3.57-3.18 (m, 18H, overlapping with methanol peak), 2.45 (t, 4H), 2.38 (t, 2H), 2.25-2.12 (m, 12H), 1.96 (s, 12H), 1.76-1.48 (m, 14H), 1.43-1.25 (m, 14H).

### Step 10: Example 32

[1867] A solution of benzyl 1-[(1S,2R,3R,4R,5S)-4-(acetylamino)-2,3-bis(acetyloxy)-6,8-dioxabicyclo[3.2.1]oct-1-yl]-18-{17-[(1S,2R,3R,4R,5S)-4-(acetylamino)-2,3-bis(acetyloxy)-6,8-dioxabicyclo[3.2.1]oct-1-yl]-5,11-dioxo-2,16-dioxa-6,10-diazaheptadec-1-yl}-7,13,20-trioxo-2,16-dioxa-8,12,19-triazahentriacontan-31-oate (1.71 g, 1.18 mmol) in methanol (24 mL) was passed through a small 10% Pd/C Catcart on the H-cube under full H2 (20 bar) at 25° C. and 1 mL/min flow rate. The Catcart was rinsed with additional methanol (10 mL) and the flow-through was concentrated to an oil. The residue was dissolved in dichloromethane and concentrated (2×25 mL) to afford a sticky white foam. The material was dried on vacuum pump overnight and subsequently dissolved in acetonitrile/water (3.8 mL, 1:1) and lyophilized to a white solid (1.52 g, 95%). ¹H NMR (400 MHz, CD₃OD) δ ppm 5.44 (d, 2H), 5.32 (s, 2H), 5.12-5.09 (m, 2H), 4.18 (d, 2H), 4.13-4.10 (m, 1H) 4.01 (d, 2H) 3.79-3.67 (m, 8H), 3.56-3.35 (m, 10H), 3.26-3.14 (m, 8H), 2.43 (t, 4H), 2.28 (t, 2H), 2.23-2.14 (m, 12H) 1.97-1.92 (m, 12H), 1.74-1.50 (m, 14H), 1.41-1.28 (m, 14H). LCMS (m/z) for C₆₃H₁₀₄N₇O₂₅⁺ (M+H)⁺ 1359.1; retention time=0.80 min (UPLC 1.5 min run).

### 1-[(1S,2R,3R,4R,5S)-4-(acetylamino)-2,3-dihydroxy-6,8-dioxabicyclo[3.2.1]oct-1-yl]-18-{17-[(1S,2R,3R,4R,5S)-4-(acetylamino)-2,3-dihydroxy-6,8-dioxabicyclo[3.2.1]oct-1-yl]-5,11-dioxo-2,16-dioxa-6,10-diazaheptadec-1-yl}-7,13,20-trioxo-2,16-dioxa-8,12,19-triazahentriacontan-31-oic acid

[chemical structure]

### Reaction Scheme:

[chemical structure]

### Step 1: 12-(Benzyloxy)-12-oxododecanoic acid

[1870] Dodecanedioic acid (15.0 g, 65.0 mmol) and Dowex-H-form (65 g) were added to a mixture of heptane (0.52 L), and benzyl formate (142 g, 1.04 mol, 130 mL) and the reaction was heated to reflux for 24 h. The reaction was then cooled and the resin filtered off. The filtrate was concentrated in vacuo and the resultant residue was purified by silica gel chromatography (0-20% ethyl acetate in heptane) to afford a slushy residue. The isolate was slurried overnight (5% ethyl acetate in heptane, 20 mL). The mixture was filtered by vacuum filtration and the resultant solid washed with heptane to afford the tile compound as a white solid (6.66 g, 39%). ¹H NMR (400 MHz, CDCl₃) δ ppm 7.36 (s, 5H), 5.12 (s, 2H), 2.42-2.30 (m, 4H), 1.75-1.54 (m, 4H), 1.45-1.16 (m, 12H).

### Step 2: Benzyl 12-oxo-12-[(2,2,16,16-tetramethyl-4,14-dioxo-3,7,11,15-tetraoxaheptadecan-9-yl)amino]dodecanoate

[1871] n-Propylphosphonic acid anhydride, cyclic trimer (2.3 g, 3.6 mmol, 2.0 mL, 50% in ethyl acetate) was added to a suspension of 12-(benzyloxy)-12-oxododecanoic acid (0.95 g, 2.98 mmol), di-tert-butyl 3,3′-[(2-aminopropane-1,3-diyl)bis(oxy)]dipropanoate (1.03 g, 2.98 mmol) and N,N-diisopropylethylamine (1.2 g, 8.9 mmol, 1.6 mL) in dimethylformamide (8 mL) and the reaction mixture was stirred at room temperature overnight. The reaction mixture was diluted with ethyl acetate (100 mL) and washed with hydrochloric acid (1 N, 30 mL), saturated sodium bicarbonate (30 mL), and brine (30 mL). The organic phase was dried over sodium sulfate, filtered, and concentrated to afford a residue which was then azeotroped with heptane (3×40 mL) to afford the title compound as a solid (2.0 g, 100%). ¹H NMR (600 MHz, CD₃CN) δ ppm 7.41-7.31 (m, 5H), 6.34 (d, 1H), 5.08 (s, 2H), 4.01 (td, 1H), 3.67-3.58 (m, 4H), 3.44 (dd, 2H), 3.36 (dd, 2H), 2.40 (t, 4H), 2.33 (t, 2H), 2.09 (t, 2H), 1.61-1.49 (m, 4H), 1.43 (s, 18H), 1.30-1.25 (m, 12H). LCMS (m/z) for C₃₆H₆₀NO₉⁺ (M+H)⁺650.5; retention time=1.23 min (UPLC 1.5 min method)

### Step 3: 3,3′-[(2-{[12-(benzyloxy)-12-oxododecanoyl]amino}propane-1,3-diyl)bis(oxy)]dipropanoic acid

[1872] A solution of 12-oxo-12-[(2,2,16,16-tetramethyl-4,14-dioxo-3,7,11,15-tetraoxaheptadecan-9-yl)amino]dodecanoate (1.60 g, 2.47 mmol) in trifluoracetic acid (15 g, 130 mmol, 10.0 mL) was stirred at ambient temperature overnight. The reaction mixture was concentrated and the resultant residue was azeotroped with diethyl ether (4×70 mL) at 20° C. and subsequently dried in vacuo overnight to afford the title compound as a gum (4.03 g, 99%, 2.11 equiv TFA). ¹H NMR (600 MHz, CD₃CN) δ ppm 7.52-7.24 (m, 5H), 6.89 (d, 1H), 5.14-5.04 (m, 2H), 4.15-4.01 (m, 1H), 3.65 (t, 4H), 3.49-3.46 (m, 2H), 3.44-3.41 (m, 2H), 2.50 (t, 4H), 2.33 (t, 2H), 2.21 (t, 2H), 1.57 (td, 4H), 1.23-1.32 (m, 12H). LCMS (m/z) for C₂₈H₄₄NO₉⁺ (M+H)⁺ 538.6; retention time=0.92 min (UPLC 1.5 min method).

### Step 4: Benzyl 12-({1,3-bis[3-oxo-3-(pentafluorophenoxy)propoxy]propan-2-yl}amino)-12-oxododecanoate

[1873] To a suspension of of 3,3′-[(2-{[12-(benzyloxy)-12-oxododecanoyl]amino}propane-1,3-diyl)bis(oxy)]dipropanoic acid (1.57 g, 2.41 mmol, 1 equiv TFA) di-isopropylethylamine (3.11 g, 24.1 mmol, 4.20 mL) in dimethylformamide (10 mL) pentafluorophenyl trifluoroacetate (5.40 g, 19.3 mmol, 3.31 mL) was added dropwise in an ice-bath. The resulting solution was stirred at ambient temperature. The reaction mixture was concentrated and azeotroped with heptane (2×20 mL). The resulting residue was diluted with ethyl acetate (80 mL), washed with 10% citric acid (30 mL), saturated sodium bicarbonate (30 mL), and brine (30 mL), dried over Na₂SO₄, and concentrated. The crude was purified by silica gel chromatography (0-60% ethyl acetate in heptane) to afford the title compound as a solid (983 mg, 47%). ¹H NMR (600 MHz, CD₃CN-d₃) δ ppm 7.44-7.24 (m, 5H), 6.23 (d, 1H), 5.08 (s, 2H), 4.08 (td, 1H), 3.81-3.76 (m, 4H), 3.53-3.42 (m, 4H), 2.92 (t, 4H), 2.32 (t, 2H), 2.07 (t, 2H), 1.62-1.46 (m, 4H), 1.32-1.19 (m, 12H). LCMS (m/z) for C₄₀H₄₂NO₉⁺ (M+H)⁺ 870.6; retention time=1.23 min (UPLC 1.5 min method).

### Step 5: 5-{[(1S,2R,3R,4R,5S)-4-(Acetylamino)-2,3-dihydroxy-6,8-dioxabicyclo[3.2.1]oct-1-yl]methoxy}pentanoic acid

[1874] To a solution of tert-butyl 5-{[(1S,2R,6R,7R,8S)-7-(acetylamino)-4,4-dimethyl-3,5,9,11-tetraoxatricyclo[6.2.1.0˜2,6˜]undec-1-yl]methoxy}pentanoate (2.09 g, 4.87 mmol) in dichloromethane (15 mL) and water (2 mL) was added trifluoroacetic acid (22 g, 200 mmol, 15 mL) and the reaction mixture was stirred at ambient temperature overnight. The crude was concentrated, azeotroped with toluene (3×50 mL), then heptane (3×50 ml), and dried in vacuo to afford the title compound as a gum (2.08 g, quantitative, 0.83 equiv TFA). LCMS (m/z) for C₁₄H₂₄NO₈⁺ (M+H)⁺ 334.2; retention time=0.45 min (UPLC 1.5 min method)

### Step 6: (1S,2R,3R,4R,5S)-4-(Acetylamino)-1-(3,9-dioxo-1-phenyl-2,14-dioxa-4,8-diazapentadecan-15-yl)-6,8-dioxabicyclo[3.2.1]octane-2,3-diyl diacetate

[1875] To solution of 5-{[(1S,2R,3R,4R,5S)-4-(acetylamino)-2,3-dihydroxy-6,8-dioxabicyclo[3.2.1]oct-1-yl]methoxy}pentanoic acid containing about 1 equiv TFA (1.0 g, 2.05 mmol) in dichloromethane (12 mL) and dimethylformamide (5 mL) was added di-isopropylethylamine (1.59 g, 12.3 mmol), o-(benzotriazol-1-yl)-N,N,N′,N′-tetramethyluronium hexafluorophosphate (0.93 g, 2.46 mmol) and 1H-benzotriazol-1-ol (277 mg, 2.05 mmol). The cloudy mixture was stirred at room temperature for 20 min. Benzyl n-(3-aminopropyl)carbamate hydrochloride (502 mg, 2 mmol) was then added. The resulting mixture was stirred at ambient temperature overnight. Formation of amide product was confirmed by LCMS [C₂₅H₃₈N₃O₉⁺, (M+H)⁺ 524.5]. The reaction mixture was concentrated to 5 mL and diluted with pyridine (6 mL). To this solution was added acetic anhydride (6.0 g, 60 mmol) and the reaction mixture was stirred at 50° C. overnight. The reaction mixture was cooled to room temperature, diluted with ethyl acetate (70 mL), washed with hydrochloric acid (1 N, 30 mL), saturated sodium bicarbonate (30 mL), and brine (30 mL). The separated organic phase was dried over sodium sulfate, filtered, and concentrated. The crude was purified by silica gel chromatography (0-15% methanol in dichloromethane) to afford the title compound as a glass (1.28 g, 100%). LCMS (m/z) for C₂₉H₄₂N₃O₁₁⁺, (M+H)⁺ 608.5; retention time=0.70 min (UPLC 1.5 min method)

### Step 7: Benzyl {3-[(5-{[(1S,2R,3R,4R,5S)-4-(acetylamino)-2,3-dihydroxy-6,8-dioxabicyclo[3.2.1]oct-1-yl]methoxy}pentanoyl)amino]propyl}carbamate

[1876] To a suspension (1S,2R,3R,4R,5 S)-4-(acetylamino)-1-(3,9-dioxo-1-phenyl-2,14-dioxa-4,8-diazapentadecan-15-yl)-6,8-dioxabicyclo[3.2.1]octane-2,3-diyl diacetate (1.5 g, 2.47 mmol) in methanol (8 mL) was added potassium hydroxide (1 M in methanol, 5.3 mL, 5.3 mmol). The reaction mixture was stirred at room temperature for 1 h. The reaction mixture was then treated with hydrochloric acid (4.0 M in dioxane, 1.5 mL) dropwise. The resulting slurry was concentrated and triturated in ethanol (15 mL) for 10 min. The resulting potassium chloride precipitate was removed by filtration, rinsed by ethanol (5 mL). The filtrate was concentrated, dried by vacuum to afford the entitled compound as a gum (1.28 g, 98%). ¹H NMR (600 MHz, MATHANOL-d₄) δ ppm 7.41-7.25 (m, 5H), 5.21 (s, 1H), 5.07 (s, 2H), 3.93 (dd, 2H), 3.86 (d, 1H), 3.77 (d, 1H), 3.71 (dd, 1H), 3.65 (d, 1H), 3.58 (d, 1H), 3.53-3.46 (m, 2H), 3.20 (t, 2H), 3.15 (t, 2H), 2.20 (t, 2H), 1.99 (s, 3H), 1.70-1.62 (m, 4H), 1.61-1.53 (m, 2H). LCMS (m/z) for C₂₅H₃₈N₃O₉⁺, (M+H)⁺ 524.5; retention time=0.64 min (UPLC 1.5 min method)

### Step 8: 5-{[(1S,2R,3R,4R,5S)-4-(Acetylamino)-2,3-dihydroxy-6,8-dioxabicyclo[3.2.1]oct-1-yl]methoxy}-N-(3-aminopropyl)pentanamide

[1877] A mixture of benzyl {3-[(5-{[(1S,2R,3R,4R,5S)-4-(acetylamino)-2,3-dihydroxy-6,8-dioxabicyclo[3.2.1]oct-1-yl]methoxy}pentanoyl)amino]propyl}carbamate (1.60 g, 2.4 mmol) and 10% palladium on carbon (200 mg) in methanol (20 mL) was stirred under hydrogen pressure (50 psi) at ambient temperature in a Parr reactor overnight. The reaction mixture was filtered through celite. The celite was washed with methanol (50 mL) and the combined filtrates were concentrated, and dried in vacuo to afford the title compound as a solid (925 mg, 97%). ¹H NMR (600 MHz, MATHANOL-d₄) δ ppm 5.21 (s, 1H), 3.94 (d, 1H), 3.90 (d, 1H), 3.86 (d, 1H), 3.77 (d, 1H), 3.71 (dd, 1H), 3.65 (d, 1H), 3.61 (d, 1H), 3.58-3.46 (m, 2H), 3.26 (t, 2H), 2.82 (t, 2H), 2.22 (t, 2H), 1.99 (s, 3H), 1.76 (quin, 2H), 1.68 (quin, 2H), 1.63-1.56 (m, 2H). LCMS (m/z) for C₁₇H₃₂N₃O₇⁺, (M+H)⁺ 390.5; retention time=0.47 min (UPLC 1.5 min method)

### Step 9: Benzyl 1-[(1S,2R,3R,4R,5S)-4-(acetylamino)-2,3-dihydroxy-6,8-dioxabicyclo[3.2.1]oct-1-yl]-18-{17-[(1S,2R,3R,4R,5S)-4-(acetylamino)-2,3-dihydroxy-6,8-dioxabicyclo[3.2.1]oct-1-yl]-5,11-dioxo-2,16-dioxa-6,10-diazaheptadec-1-yl}-7,13,20-trioxo-2,16-dioxa-8,12,19-triazahentriacontan-31-oate

[1878] A mixture of 5-{[(1S,2R,3R,4R,5S)-4-(acetylamino)-2,3-dihydroxy-6,8-dioxabicyclo[3.2.1]oct-1-yl]methoxy}-N-(3-aminopropyl)pentanamide (607 mg, 1.40 mmol) and benzyl 12-({1,3-bis[3-oxo-3-(pentafluorophenoxy)propoxy]propan-2-yl}amino)-12-oxododecanoate (500 mg, 0.58 mmol), and N,N-diisopropylethylamine (200 mg, 2.0 mmol) in a mixture of dichloromethane (8 mL) and dimethylformamide (3 mL) was stirred at room temperature overnight. The reaction mixture was concentrated, azeotroped with heptane (3×10 mL), and concentrated. The crude residue was purified by silica gel chromatography (0-40% methanol in dichloromethane) to afford the title compound as a glass (520 mg, 71%). ¹H NMR (600 MHz, METHANOL-d₄) δ ppm 7.37-7.29 (m, 5H), 5.21 (s, 2H), 5.11 (s, 2H), 4.11 (t, 1H), 3.94 (dd, 4H), 3.87 (d, 2H), 3.77 (d, 2H), 3.75-3.67 (m, 6H), 3.64 (d, 2H), 3.57 (d, 2H), 3.55-3.42 (m, 8H), 3.23-3.19 (m, 8H), 2.43 (t, 4H), 2.36 (t, 2H), 2.20 (q, 6H), 1.98 (s, 6H), 1.72-1.54 (m, 16H), 1.35-1.28 (m, 12H). LCMS C₆₂H₁₀₂N₇O₂₁⁺, (M+H)⁺ 1280.3; retention time=1.45 min (UPLC 3 min method)

### Step 10: Example 33. 1-[(1S,2R,3R,4R,5S)-4-(acetylamino)-2,3-dihydroxy-6,8-dioxabicyclo[3.2.1]oct-1-yl]-18,18-bis{17-[(1S,2R,3R,4R,5S)-4-(acetylamino)-2,3-dihydroxy-6,8-dioxabicyclo[3.2.1]oct-1-yl]-5,11-dioxo-2,16-dioxa-6,10-diazaheptadec-1-yl}-7,13,20-trioxo-2,16-dioxa-8,12,19-triazahentriacontan-31-oic acid

[1879] A solution of benzyl 1-[(1S,2R,3R,4R,5S)-4-(acetylamino)-2,3-dihydroxy-6,8-dioxabicyclo[3.2.1]oct-1-yl]-18-{17-[(1S,2R,3R,4R,5S)-4-(acetylamino)-2,3-dihydroxy-6,8-dioxabicyclo[3.2.1]oct-1-yl]-5,11-dioxo-2,16-dioxa-6,10-diazaheptadec-1-yl}-7,13,20-trioxo-2,16-dioxa-8,12,19-triazahentriacontan-31-oate (520 mg, 0.41 mmol) in methanol (16 mL) was passed through 10% Pd/C 30×4 CatCart® on ThalesNano H-Cube Pro™ with a flow rate of 1 mL/min at 25° C. under full Hz. The system was rinsed by methanol (20 mL). The filtrate was concentrated, azeotroped with methylene chloride (20 mL), then heptane (20 mL). The resulting residue was dissolved in acetonitrile/water (1:1, 20 mL) and freeze dried to afford the title compound as a white solid (477 mg, 99%). ¹H NMR (600 MHz, METHANOL-d₄) δ ppm 5.21 (s, 2H), 4.11 (t, 1H), 3.98-3.87 (m, 4H), 3.87 (d, 2H), 3.78 (d, 2H), 3.74-3.67 (m, 6H), 3.65 (d, 2H), 3.58 (d, 2H), 3.55-3.45 (m, 8H), 3.21 (q, 8H), 2.43 (t, 4H), 2.27 (t, 2H), 2.23-2.16 (m, 6H), 1.99 (s, 6H), 1.72-1.62 (m, 8H), 1.63-1.54 (m, 8H), 1.35-1.28 (m, 12H). LCMS (m/z) for C₅₅H₉₆N₇O₂₁⁺, (M+H)⁺ 1190.7; retention time=1.07 min (UPLC 3 min method).

### 1-[(1S,2R,3R,4R,5S)-4-(acetylamino)-2,3-dihydroxy-6,8-dioxabicyclo[3.2.1]oct-1-yl]-7,13,20-trioxo-2,16-dioxa-8,12,19-triazahentriacontan-31-oic acid

[chemical structure]

### Reaction Scheme:

[chemical structure]

### Step 1: Benzyl 12-{[2-(3-tert-butoxy-3-oxopropoxy)ethyl]amino}-12-oxododecanoate

[1882] 12-benzyloxy-12-oxodececanoic acid (2.33 g, 7.26 mmol), tert-butyl 3-(2-aminoethoxy)propanoate (1.25 g, 6.60 mmol) and N,N-diisopropylethylamine (2.3 ml, 13 mmol) were dissolved in N,N-dimethylformamide (35 mL). To this solution was added N,N,N′,N′-tetramethyl-O-(1H-benzotriazol-1-yl)uronium hexafluorophosphate, O-(Benzotriazol-1-yl)-N,N,N′,N′-tetramethyluronium hexafluorophosphate (2.75 g, 7.26 mmol) and the reaction stirred at ambient temperature for 16 h. The reaction was concentrated and the residue was dissolved in ethyl acetate (100 mL) and washed sequentially with saturated sodium bicarbonate, water, and brine (25 mL each). The organic layer was then dried over sodium sulfate, filtered and concentrated to a colorless oil. The residue was purified by silica gel chromatography (0-100% ethyl acetate in heptane) to afford the desired product as a white solid (2.58 g, 80%). ¹H NMR (400 MHz, CDCl₃) δ ppm 7.41-7.30 (m, 5H), 6.18 (br.s., 1H), 5.12 (s, 2H), 3.69 (t, 2H), 3.57-3.51 (m, 2H), 3.49-3.42 (m, 2H), 2.49 (t, 2H), 2.36 (t, 2H), 2.23-2.14 (m, 2H), 1.63 (d, 4H), 1.47 (s, 9H), 1.36-1.22 (m, 12H).

### Step 2: 3-(2-{[12-(Benzyloxy)-12-oxododecanoyl]amino}ethoxy)propanoic acid

[1883] Benzyl 12-{[2-(3-tert-butoxy-3-oxopropoxy)ethyl]amino}-12-oxododecanoate (2.58 g, 5.25 mmol) was dissolved in dichloromethane (12 mL). To this was added trifluoroacetic acid (20 ml, 0.27 mol). After 2 h stirring at ambient temperature, the reaction was concentrated. The resultant residue was dissolved in toluene and concentrated (2×20 mL) and subsequently dried on vacuum pump to afford a solid (2.21 g). ¹H NMR (400 MHz, CDCl₃) δ ppm 7.41-7.30 (m, 5H) 6.08 (br.s., 1H) 5.12 (s, 2H) 3.74 (t, 2H) 3.61-3.51 (m, 2H) 3.50-3.40 (m, 2H) 2.64 (t, 2H) 2.36 (t, 2H) 2.25-2.11 (m, 2H) 1.72-1.54 (m, 4H) 1.27 (m, 12H).

### Step 3: Benzyl 12-oxo-12-({2-[3-oxo-3-(pentafluorophenoxy)propoxy]ethyl}amino)dodecanoate

[1884] N,N-diisopropylethylamine (3.52 ml, 20.2 mmol) was added to a solution of 3-(2-{[12-(benzyloxy)-12-oxododecanoyl]amino}ethoxy)propanoic acid (2.20 g, 5.05 mmol) in dimethylformamide (24 mL). To this was then added pentafluorophenol-2,2,2-trifluoroacetate (1.74 mL, 10.1 mmol) in a slow stream. The reaction turned purple in color and was stirred at ambient temperature for 18 h. The reaction mixture was concentrated to ⅓ volume on a rotary evaporator (50° C., high vacuum pump) and the resultant concentrate was diluted with ethyl acetate (300 mL), washed with 10% citric acid (100 mL), saturated sodium bicarbonate (100 mL) and brine (100 mL). The organic layer was dried over sodium sulfate, filtered, and concentrated. The residue was purified by silica gel chromatography (0-100% ethyl acetate in heptane) to afford the desired product as a yellow solid (2.46 g, 78% over 2 steps). ¹H NMR (400 MHz, CDCl₃) δ ppm 7.41-7.30 (m, 5H), 5.85 (br.s., 1H) 5.12 (s, 2H), 3.85 (t, 2H), 3.64-3.54 (m, 2H), 3.52-3.43 (m, 2H), 2.94 (t, 2H), 2.36 (t, 2H), 2.16 (t, 2H), 1.70-1.60 (m, 4H), 1.26 (m, 12H).

### Step 4: Benzyl 1-[(1S,2R,3R,4R,5S)-4-(acetylamino)-2,3-dihydroxy-6,8-dioxabicyclo[3.2.1]oct-1-yl]-20-oxo-2,16-dioxa-8,12,19-triazahentriacontan-31-oate

[1885] A mixture of 5-{[(1S,2R,3R,4R,5S)-4-(acetylamino)-2,3-dihydroxy-6,8-dioxabicyclo[3.2.1]oct-1-yl]methoxy}-N-(3-aminopropyl)pentanamide (172 mg, 0.440 mmol) and benzyl 12-oxo-12-({2-[3-oxo-3-(pentafluorophenoxy)propoxy]ethyl}amino)dodecanoate (220 mg, 0.402 mmol), N,N-diisopropylethylamine (95 mg, 0.73 mmol) in a mixture of dichloromethane (3.3 mL) and dimethylformamide (0.7 mL) was stirred at room temperature overnight. The reaction mixture was concentrated, azeotroped with heptane (3×10 mL), and concentrated. The crude was purified by silica gel chromatography (0-25% methanol in dichloromethane to afford the title compound as an oil (185 mg, 57%). ¹H NMR (600 MHz, METHANOL-d₄) δ ppm 7.39-7.28 (m, 5H), 5.21 (s, 1H), 5.11 (s, 2H), 3.99-3.89 (m, 2H), 3.87 (d, 1H), 3.77 (d, 1H), 3.75-3.67 (m, 3H), 3.64 (d, 1H), 3.57 (d, 1H), 3.55-3.44 (m, 4H), 3.38-3.32 (m, 2H), 3.26-3.16 (m, 4H), 2.44 (t, 2H), 2.36 (t, 2H), 2.19 (td, 4H), 1.99 (s, 3H), 1.70-1.55 (m, 10H), 1.33-1.25 (m, 12H). LCMS (m/z) for C₄₁H₆₇N₄O₁₂⁺, (M+H)⁺ 807.8; retention time=1.60 min (UPLC 3 min method).

### Step 5: Example 34

[1886] A solution of benzyl 1-[(1S,2R,3R,4R,5S)-4-(acetylamino)-2,3-dihydroxy-6,8-dioxabicyclo[3.2.1]oct-1-yl]-20-oxo-2,16-dioxa-8,12,19-triazahentriacontan-31-oate (0.22 g, 0.25 mmol) in methanol (22 mL) was passed through 10% Pd/C 30×4 CatCart® on ThalesNano H-cube Pro™ with a flow rate of 1 mL/min at 25° C. under full H2. The system was rinsed by methanol (40 mL). The filtrate was concentrated, azeotroped with methylene chloride (20 mL), then heptane (20 mL). The resulting residue was dissolved in acetonitrile/water (1:1, 20 mL) and freeze dried to afford the title compound as a white solid (177 mg, 99%). ¹H NMR (600 MHz, METHANOL-d₄) δ ppm 5.20 (s, 1H), 4.01-3.89 (m, 2H), 3.87 (d, 1H), 3.77 (d, 1H), 3.75-3.68 (m, 3H), 3.65 (d, 1H), 3.57 (d, 1H), 3.55-3.45 (m, 4H), 3.34 (t, 2H), 3.27-3.14 (m, 4H), 2.44 (t, 2H), 2.28 (t, 2H), 2.20 (td, 4H), 1.98 (s, 3H), 1.67 (t, 4H), 1.63-1.54 (m, 6H), 1.35-1.28 (m, 12H). C₃₄H₆₁N₄O₁₂⁺, (M+H)⁺ 717.7; retention time=1.12 min (UPCL 3 min method).

### 5,11,18-trioxo-16-{[3-oxo-3-({3-[(5-{[3,4,6-tri-O-acetyl-2-(acetylamino)-2-deoxy-β-D-galactopyranosyl]oxy}pentanoyl)amino]propyl}amino)propoxy]methyl}-1-{[3,4,6-tri-O-acetyl-2-(acetylamino)-2-deoxy-β-D-galactopyranosyl]oxy}-14-oxa-6,10,17-triazanonacosan-29-oic acid

[chemical structure]

### Reaction Scheme:

[chemical structure]

### Step 1: Benzyl {3-[(5-{[3,4,6-tri-O-acetyl-2-(acetylamino)-2-deoxy-β-D-galactopyranosyl]oxy}pentanoyl)amino]propyl}carbamate

[1889] N,N-diisopropylethylamine (1.38 mL, 7.95 mmol) was added to a solution of benzyl (3-aminopropyl)carbamate hydrochloride salt (0.713 g, 2.01 mmol) in N,N-dimethylformamide (3.5 mL). The resultant mixture was then added to a solution of 5-(((2R,3R,4R,5R,6R)-3-acetamido-4,5-diacetoxy-6-(acetoxymethyl)tetrahydro-2H-pyran-2-yl)oxy)pentanoic acid (1.19 g, 2.65 mmol) in dimethylformamide (10 mL). 1-[Bis(dimethylamino)methylene]-1H-1,2,3-triazol[4,5-b]pyridinium 3-oxid hexafluorophosphate (1.11 g, 2.91 mmol) was then added and the reaction mixture was stirred at ambient temperature under an atmosphere of nitrogen (2.5 h). The reaction was quenched with saturated ammonium chloride (50 mL) and extracted with dichloromethane (4×75 mL). The combined organic layers were washed with brine (50 mL), dried over sodium sulfate, filtered and concentrated. The resultant oil was purified by silica gel chromatography (2-6% methanol in dichloromethane) to afford the desired product as a white foam (0.904 g, 53%). ¹H NMR (400 MHz, CD₃OD) δ ppm 7.41-7.25 (m, 5H), 5.33 (d, 1H), 5.12-5.02 (m, 3H), 4.54 (d, 1H), 4.19-4.03 (m, 3H), 4.03-3.97 (m, 1H), 3.91-3.82 (m, 1H), 3.60-3.46 (m, 2H), 3.11-3.25 (m, 4H), 2.16-2.23 (m, 2H), 2.13 (s, 3H), 2.02 (s, 3H), 1.95 (s, 3H), 1.92 (s, 3H), 1.73-1.53 (m, 6H), 1.40-1.34 (m, 2H).

### Step 2: N-(3-aminopropyl)-5-{[3,4,6-tri-O-acetyl-2-(acetylamino)-2-deoxy-β-D-galactopyranosyl]oxy}pentanamide acetate salt

[1890] Benzyl {3-[(5-{[3,4,6-tri-O-acetyl-2-(acetylamino)-2-deoxy-β-D-galactopyranosyl]oxy}pentanoyl)amino]propyl}carbamate 5-{[3,4,6-tri-O-acetyl-2-(acetylamino)-2-deoxy-β-D-galactopyranosyl]oxy}pentanoic acid (1.01 g, 1.59 mmol) was dissolved in a mixture of methanol (30 mL) and glacial acetic acid (91 uL, 1.6 mmol). To this was added 10% Pd/C (0.2 g, wet) under nitrogen and the reaction mixture was placed in a sealed, stirred Parr reactor under 50 psi hydrogen. After 16 h the head space was purged with nitrogen (×4) and filtered through a 0.45 um nylon syringe filter. The filter was washed with methanol and the combined filtrates were concentrated to afford the title compound as a white foam (0.86 g mg, 96%). ¹H NMR (400 MHz, CD₃OD) δ ppm 5.34 (d, 1H), 5.06-5.02 (m, 1H), 4.52 (d, 1H), 4.19-4.05 (m, 3H), 4.04-3.98 (m, 1H), 3.92-3.84 (m, 1H), 3.56-3.47 (m, 1H), 2.98-2.89 (m, 2H), 2.23 (t, 2H), 2.14 (s, 3H), 2.06 (d, 1H), 2.03 (s, 3H), 1.94 (d, 5H), 1.91 (s, 3H), 1.83 (m, 2H), 1.74-1.54 (m, 4H), 1.39-1.31 (m, 1H).

### Step 3: Benzyl 5,11,18-trioxo-16-{[3-oxo-3-({3-[(5-{[3,4,6-tri-O-acetyl-2-(acetylamino)-2-deoxy-β-D-galactopyranosyl]oxy}pentanoyl)amino]propyl}amino)propoxy]methyl}-1-{[3,4,6-tri-O-acetyl-2-(acetylamino)-2-deoxy-β-D-galactopyranosyl]oxy}-14-oxa-6,10,17-triazanonacosan-29-oate

[1891] Benzyl 12-({1,3-bis[3-oxo-3-(pentafluorophenoxy)propoxy]propan-2-yl}amino)-12-oxododecanoate (150 mg, 0.172 mmol), N-(3-aminopropyl)-5-{[3,4,6-tri-O-acetyl-2-(acetylamino)-2-deoxy-β-D-galactopyranosyl]oxy}pentanamide acetate salt (233 mg, 0.414 mmol) and N,N-diisopropylethylamine (0.15 ml, 0.862 mmol) were dissolved in dichloromethane (3.5 mL) and stirred at ambient temperature for 64 h. The reaction mixture was concentrated and heptane was added and the residue concentrated once again (×3). The resultant residue was purified by silica gel chromatography (4-14% methanol in dichloromethane) to afford the desired product as a colorless glass (175 mg, 67%). The compound was then dissolved in a mixture of acetonitrile and water (1:1, 30 mL) and freeze dried to afford a white solid. ¹H NMR (400 MHz, CDCl₃) δ ppm 7.42-7.37 (m, 5H), 7.15 (br.s., 2H) 6.94-6.84 (m, 3H), 6.51-6.45 (m, 2H), 5.38 (d, 2H), 5.20 (d, 2H), 5.14 (s, 2H), 4.65-4.57 (m, 2H), 4.27-4.06 (m, 8H), 4.02-3.90 (m, 4H), 3.73 (br.s., 6H), 3.63-3.42 (m, 8H), 3.37-3.26 (m, 8H), 2.47 (br.s., 5H), 2.38 (t, 3H), 2.34-2.15 (m, 15H), 2.12 (s, 6H), 2.03 (s, 6H), 1.98 (s, 6H), 1.78 (br.s., 4H) 1.28 (d, 14H).

### Step 4: Example 35

[1892] 10% Pd/C (30 mg, wet) was added to a solution of Benzyl-5,11,18-trioxo-16-{[3-oxo-3-({3-[(5-{[3,4,6-tri-O-acetyl-2-(acetylamino)-2-deoxy-β-D-galactopyranosyl]oxy}pentanoyl)amino]propyl}amino)propoxy]methyl}-1-{[3,4,6-tri-O-acetyl-2-(acetylamino)-2-deoxy-β-D-galactopyranosyl]oxy}-14-oxa-6,10,17-triazanonacosan-29-oate (282 mg, 0.187 mmol) in methanol (5 mL). The mixture was placed in the HelCat under 50 psi hydrogen and stirred at ambient temperature for 16 h. The head space was then purged with nitrogen (×3) and the solution was filtered through a 0.2 um nylon syringe filter. The filter was washed with methanol and the combined filtrates were concentrated to afford the title compound as a white foam which was then dissolved in a mixture of acetonitrile and water (1:1, 20 mL) and freeze dried to a white solid (262 mg, 99%). ¹H NMR (400 MHz, CD₃OD) δ ppm 5.33 (d, 2H), 5.08-5.04 (m, 2H), 4.55 (d, 2H) 4.21-3.98 (m, 10H), 3.91-3.83 (m, 2H), 3.69 (t, 4H) 3.60-3.44 (m, 8H), 3.24-3.19 (m, 8H), 2.43 (t, 4H), 2.31-2.16 (m, 8H), 2.14 (s, 6H), 2.06-2.00 (m, 6H), 1.94 (d, 10H), 1.73-1.55 (m, 15H), 1.40-1.28 (m, 12H). LCMS (m/z) for C₆₅H₁₀₈N₇O₂₇⁺ (M+H)⁺ 1419.7; retention time=1.34 min (UPLC 3.0 min run)

### 5,11,18-trioxo-1-{[3,4,6-tri-O-acetyl-2-(acetylamino)-2-deoxy-β-D-galactopyranosyl]oxy}-14-oxa-6,10,17-triazanonacosan-29-oic acid

[chemical structure]

### Reaction Scheme:

[chemical structure]

### Step 1: Benzyl 5,11,18-trioxo-1-{[3,4,6-tri-O-acetyl-2-(acetylamino)-2-deoxy-β-D-galactopyranosyl]oxy}-14-oxa-6,10,17-triazanonacosan-29-oate

[1895] N-(3-aminopropyl)-5-{[3,4,6-tri-O-acetyl-2-(acetylamino)-2-deoxy-β-D-galactopyranosyl]oxy}pentanamide acetate salt (159 mg, 0.264 mmol) was added to a solution of benzyl 12-oxo-12-({2-[3-oxo-3-(pentafluorophenoxy)propoxy]ethyl}amino)dodecanoate (164 mg, 0.291 mmol) and N,N-diisopropylethylamine (200 uL, 1.32 mmol) in dichloromethane (5 mL) and the reaction was stirred at ambient temperature for 16 h. The reaction mixture was concentrated and the resultant residue was taken up in heptane and concentrated (3×10 ml). The resultant residue was purified by silica gel chromatography (0-10% methanol in dichloromethane) to afford the title compound as colorless glass (116 mg, 48%). LCMS (m/z) for C₄₈H₇₂N₄O₁₅⁺ (M+H)⁺ 921.8; retention time=0.91 min (UPLC 1.3 min run).

### Step 2: Example 36

[1896] 10% Pd/C (25 mg, wet) was added under nitrogen to a solution of benzyl5,11,18-trioxo-1-{[3,4,6-tri-O-acetyl-2-(acetylamino)-2-deoxy-β-D-galactopyranosyl]oxy}-14-oxa-6,10,17-triazanonacosan-29-oate (196 mg, 0.213 mmol) in methanol (5 mL). The reaction was placed in the HelCat under 50 psi hydrogen and stirred at ambient temperature for 16 h. The head space was purged with nitrogen (×3) and the solution was filtered through a 0.2 um nylon syringe filter. The filter was washed with methanol and the combined filtrates were concentrated to afford the title compound as a colorless glass which was then dissolved in a mixture of acetonitrile and water (1:1, 20 mL) and freeze dried to afford a white solid (165 mg, 93%). ¹H NMR (400 MHz, CD₃OD) δ ppm 8.01-7.91 (m, 1H), 5.33 (d, 1H), 5.06 (m, 1H), 4.55 (d, 1H), 4.19-3.98 (m, 4H), 3.91-3.84 (m, 1H), 3.76-3.67 (m, 2H), 3.57-3.47 (m, 4H), 3.25-3.18 (m, 4H), 2.44 (t, 2H), 2.30-2.16 (m, 6H), 2.14 (s, 3H), 2.02 (s, 3H), 1.95 (s, 3H), 1.93 (s, 3H), 1.73-1.54 (m, 10H), 1.39-1.28 (m, 12H). LCMS (m/z) for C₃₉H₆₇N₄O₁₅⁺ (M+H)⁺ 831.8; retention time=1.30 min (UPLC 3.0 min run.

### Example 37. Synthesis of Oligonucleotides

[1897] Synthesis of various oligonucleotides is described herein. The two digits following the decimal after the WV oligonucleotide designation indicate a batch number. For example, WV-7107.03 indicates batch 03 of WV-7107.

### Example 37A. Synthesis of WV-7107 and WV-6558

[1898] WV-6558 which has the sequence 5′-Mod001L001Aeo*SGeom5CeoTeoTeo*RC*ST*ST*SG*RT*SC*SC*RA*SG*SC*RTeoTeoTeoAeo*S Teo-3′ is a GalNAc conjugate of WV-7107 which has the sequence 5′-L001Aeo*SGeom5CeoTeoTeo*RC*ST*ST*SG*RT*SC*SC*RA*SG*SC*RTeoTeoTeoAeo*STeo-3′. The GalNAc conjugation step is performed on WV-7107 to make WV-6558.

### Solid Phase Synthesis of WV-7107:

[1899] Synthesis of WV-7107 was performed on an ÄKTA OP100 synthesizer (GE healthcare) using a 6.0 cm diameter stainless steel column reactor on a 3300 μmol scale using CPG support (Loading 72 umol/g). The process consists of five steps; detritylation, coupling, capping 1, oxidation/thiolation and capping 2. Detritylation was performed using 3% DCA in toluene with a UV watch command set at 436 nm. Following detritylation, at least 4 column volumes (CV) of ACN was used to wash off the detritylation reagent.

[1900] All phosphoramidite and activator solutions (CMIMT and ETT) were prepared and dried over 3 Å molecular sieves for at least 4 hours prior to synthesis.

[1901] Stereo-defined amidite coupling was performed using 0.2 M amidite solutions and 0.6 M CMIMT. All amidites were dissolved in ACN except dC-L and dC-D amidites which were dissolved in isobutyronitrile (IBN). Stereo-defined MOE amidites were dissolved in 20% IBN/ACN v/v. CMIMT was dissolved in ACN. Using 4 equivalents, coupling was performed by mixing 40% (by volume) of the respective amidite solution with 67% of the CMIMT activator in-line prior to addition to the column. The coupling mixture was then recirculated for a minimum of 10 minutes to maximize the coupling efficiency.

[1902] Standard stereorandom amidite coupling was performed using 0.2 M amidite solutions and 0.6 M ETT in ACN. MOE-T amidite was dissolved 20% IBN/ACN v/v. Using 4 equivalents, coupling was performed by mixing 40% (by volume) of the respective amidite solution with 60% of the ETT activator in-line prior to addition to the column. The coupling mixture was then recirculated for a minimum of 6 minutes to maximize the coupling efficiency.

[1903] After coupling in both instances, the column was washed with 2CV of ACN.

[1904] For stereo-defined couplings, the column was then treated with Capping 1 solution (Acetic Anhydride, Lutidine, ACN) mixture for 1 CV to in 4 minutes acetylate the Chiral axillary amine. Following this step the column was washed with ACN for at least 2 CV. Thiolation was then performed with 0.2 M Xanthane Hydride in pyridine with a contact time of 6 min for 2 CV. After a 2 CV thiolation wash step using ACN, capping 2 was performed using 0.5 CV of Capping A and Capping B reagents mixed inline (1:1) followed by a 2 CV ACN wash.

[1905] For stereorandom coupling cycles, there is no Capping 1 step. Oxidation was performed using 50 mM Iodine in/Pyridine/H2O (9:1) for 2.5 min and 3.5 equivalents. After a 2CV ACN wash, capping 2 was performed using 0.5 CV of Capping A and Capping B reagents mixed inline (1:1) followed by a 2 CV ACN wash.

### Cleavage and Deprotection of WV-7107:

[1906] 67% (or 2200 μmol) of the material synthesized above was used in this step. The DPSE protecting groups on WV-7107 were removed by treating the oligo bound solid support with a 1M solution of TEA.HF made by mixing DMSO, Water, TEA and TEA.3HF in a v/v ratio of 39:8:1:2.5, to make a 100 mL solution per mmol of oligo. The mixture was then shaken at 25° C. for 6 hours in an incubator shaker. The mixture was cooled (ice bath) then 200 mL of aqueous ammonia per mmol of oligo added. The mixture was then shaken at 45° C. for 16 hours. The mixture was then filtered (0.2-1.2 μm filters) and the cake rinsed with water. The filtrate liquor was obtained and analyzed by UPLC and a purity of 30.8% FLP obtained. Quantitation was done using a Nano Drop one spectrophotometer (Thermo Scientific) and a yield of about 101,200 OD/mmol obtained.

### Purification and Desalting of WV-7107:

[1907] The crude WV-7107 loaded on to an Agilent Load & Lock column (5 cm×32 cm) packed with Source 15Q (GE healthcare). Purification was performed on an ÄKTA 150 Pure (GE Healthcare) using 20 mM NaOH and 2.5 M NaCl as eluents. Fractions were analyzed and pooled to obtain material with a purity ≥70%. The purified material was then desalted on 2K re-generated cellulose membranes followed by lyophilization to obtain WV-7107 as a white powder. This material was then used for conjugation experiments.

### Example 37B. Synthesis of WV-6558

### Protocol for GalNAc Conjugation

[1908] Precursor material: WV-7107.03

[1909] Final Conjugated product: WV-6558.03

[1910] Reagents for Conjugation

| | | Equivalent | | | |
|---|---|---|---|---|---|
| Oligonucleotide/ | | to Oligo- | | | |
| Reagents | MW | nucleotide | mg | μL | μmole |
| WV-7107.03 | 7191.7 | 1 | 400 | — | 55.62 |
| Tri-antennary GalNAc | 2005 | 1.6 | 178.4 | — | 88.99 |
| Lot: GL-N12-26 | | | | | |
| HATU | 382 | 1.4 | 29.75 | — | 77.87 |
| P/N Sigma 445460 | | | | | |
| Lot: MKBV8272V | | | | | |
| DIEA | 129 | 10.0 | — | 98.83 | 556.2 |
| P/N Sigma 387649 | | | | | |
| Lot: SHBG2052V | | | | | |
| Acetonitrile | — | — | — | 4000 | — |

TABLE 2
Aqueous Oligonucleotide Solution

| Oligonucleotide/ | Conc | Total volume | |
|---|---|---|---|
| Solvent | (mg/mL) | (mL) | Total mg |
| WV-7107.01 in water | 50 | 8 | 400 |

[1911] Weighed 1-(((2R,3R,4R,5R,6R)-3-acetamido-4,5-diacetoxy-6-(acetoxymethyl)tetrahydro-2H-pyran-2-yl)oxy)-16,16-bis((3-((3-(5-(((2R,3R,4R,5R,6R)-3-acetamido-4,5-diacetoxy-6-(acetoxymethyl)tetrahydro-2H-pyran-2-yl)oxy)pentanamido)propyl)amino)-3-oxopropoxy)methyl)-5,11,18-trioxo-14-oxa-6,10,17-triazanonacosan-29-oic acid (1.6 eq), and HATU (1.4 eq.) and transferred to a 50 ml plastic tube. Dissolved the material in anhydrous acetonitrile then add DIEA (d=0.742) (10 eq) into the tube. The clear mixture was stirred for 20 min at 37° C. Reconstituted the lyophilized WV-7107 sample with 8 mL water to a concentration at 50 mg/mL. Then the GalNac mixture was added to sample WV-7107 and stirred for 60 min at 37° C. The progress of the reaction was monitored by UPLC. The reaction is complete after 1h of incubation. The solution was concentrated under vacuum (by speed vac) to remove acetonitrile and the resultant GalNAc-conjugated oligo was treated with concentrated Ammonium hydroxide (5 mL) for deprotection by incubating for 1 h at 37° C. The formation of the final product WV-6558 was confirmed by UPLC and Mass Spectrometry. The conjugated samples were purified by anion exchange chromatography. Observed Mass: 8802.4 (Deconvoluted), Target Mass: 8801.6.

### Example 37C. Synthesis of WV-9542

### Protocol for PFE Conjugation

[1912] Precursor material: WV-7107.02

[1913] Final Conjugated product: WV-9542.01

### Reagents for Conjugation

| | | Equivalent | | | |
|---|---|---|---|---|---|
| Oligonucleotide/ | | to Oligo- | | | |
| Reagents | MW | nucleotide | mg | μL | μmole |
| WV-7107.02 | 7191.7 | 1 | 1700 | — | 236.38 |
| Tri-antennary PFE | 2065.8 | 1.6 | 781.3 | — | 378.21 |
| ASGPR ligand | | | | | |
| Lot: GL-N12-58 | | | | | |
| HATU | 382 | 1.2 | 108.36 | — | 283.66 |
| P/N Sigma 445460 | | | | | |
| Lot: MKBV8272V | | | | | |
| DIEA | 129 | 10.0 | 304.93 | 420.02 | 2363.84 |
| P/N Sigma 387649 | | | | | |
| Lot: SHBG2052V | | | | | |
| DMF | — | — | — | 13000 | — |

TABLE 2
Aqueous Oligonucleotide Solution

| Oligonucleotide/ | Conc | Total volume | |
|---|---|---|---|
| Solvent | (mg/mL) | (mL) | Total mg |
| WV-7107.01 in water | 60 | 13 | 1800 |

[1915] Weighed Tri-antennary PFE ASGPR ligand (18,18-bis(17-((1S,2R,3R,4R,5S)-4-acetamido-2,3-dihydroxy-6,8-dioxabicyclo[3.2.1]octan-1-yl)-5,11-dioxo-2,16-dioxa-6,10-diazaheptadecyl)-1-((1S,2R,3R,4R,5S)-4-acetamido-2,3-dihydroxy-6,8-dioxabicyclo[3.2.1]octan-1-yl)-7,13,20-trioxo-2,16-dioxa-8,12,19-triazahentriacontan-31-oic acid) (1.6 eq), and HATU (1.2 eq.) and transferred to a 50 mL tube. Dissolved the material in anhydrous Dimethylformamide then add DIEA (d=0.742) (10 eq) into the tube. The solution was sonicated till it became clear, and it was stirred for 20 min at 37° C. Reconstituted WV-7107 sample with 13 mL water. Then the Tri-antennary PFE ligand mixture was added to sample WV-7107 and stirred for 1 hr at 37° C. The progress of the reaction was monitored by UPLC. The reaction was incomplete after 1 hr incubation. Second addition of Tri-antennary PFE ligand (1.2 eq) and HATU (1 eq) were weighed out and dissolved in 5 mL DMF with DIEA (15 eq). Incubated the ligand for 20 min at 37° C. for activation. Then added the activated ligand to the reaction mixture and incubated for 1 hr at 37° C. The reaction completed and the formation of the final product WV-9542 was confirmed by UPLC and Mass Spectrometry. The conjugated samples were purified by anion exchange chromatography. Observed Mass: 8837.6 (Deconvoluted), Target Mass: 8837.6.

### Example 37D. Synthesis of WV-9543

### Protocol for PFE Conjugation

[1916] Precursor material: WV-7107.02

[1917] Final Conjugated product: WV-9543.01

### Reagents for Conjugation

| | | Equivalent | | | |
|---|---|---|---|---|---|
| Oligonucleotide/ | | to Oligo- | | | |
| Reagents | MW | nucleotide | mg | μL | μmole |
| WV-7107.02 | 7191.7 | 1 | 90 | — | 12.51 |
| Bis-antennary GalNAc | 1418.59 | 2 | 35.5 | — | 25.03 |
| Lot: PF-07075575 | | | | | |
| HATU | 382 | 1.8 | 8.6 | — | 22.53 |
| P/N Sigma 445460 | | | | | |
| Lot: MKBV8272V | | | | | |
| DIEA | 129 | 10.0 | 16.14 | 22.24 | 125.14 |
| P/N Sigma 387649 | | | | | |
| Lot: SHBG2052V | | | | | |
| Dimethylformamide | — | — | — | 1500 | — |

TABLE 2
Aqueous Oligonucleotide Solution

| Oligonucleotide/ | Conc | Total volume | |
|---|---|---|---|
| Solvent | (mg/mL) | (mL) | Total mg |
| WV-7107.01 in water | 60 | 1.5 | 90 |

[1919] Weighed the Bis-antennary GalNAc (1-(((2R,3R,4R,5R,6R)-3-acetamido-4,5-diacetoxy-6-(acetoxymethyl)tetrahydro-2H-pyran-2-yl)oxy)-16-((3-((3-(5-(((2R,3R,4R,5R,6R)-3-acetamido-4,5-diacetoxy-6-(acetoxymethyl)tetrahydro-2H-pyran-2-yl)oxy)pentanamido)propyl)amino)-3-oxopropoxy)methyl)-5,11,18-trioxo-14-oxa-6,10,17-triazanonacosan-29-oic acid) (2.0 eq), and HATU (1.8 eq) and transferred to a 50 mL tube. Dissolved the material in anhydrous Dimethylformamide (1.5 mL) then add DIEA (d=0.742) (10 eq) into the tube. The solution was sonicated till it became clear, and it was stirred for 20 min at 37° C. Reconstituted WV-7107 sample with 1.5 mL water. Then the Bis-antennary GalNAc mixture was added to sample WV-7107 and stirred for 1 hr at 37° C. The progress of the reaction was monitored by UPLC. The reaction was completed after 1 hr incubation. The mixture was treated with concentrated Ammonium hydroxide (2 mL) for deprotection by incubating for 1 h at 37° C. Formation of the final product WV-9543 was confirmed by UPLC and Mass Spectrometry. The conjugated samples were purified by anion exchange chromatography. Observed Mass: 8342.6 (Deconvoluted), Target Mass: 8340.1.

### Example 37E. Synthesis of WV-9544

### Protocol for PFE Conjugation

[1920] Precursor material: WV-7107.02

[1921] Final Conjugated product: WV-9544.01

### Reagents for Conjugation

| | | Equivalent | | | |
|---|---|---|---|---|---|
| Oligonucleotide/ | | to Oligo- | | | |
| Reagents | MW | nucleotide | mg | μL | μmole |
| WV-7107.02 | 7191.7 | 1 | 90 | — | 12.51 |
| Bis-antennary PFE | 1190.39 | 2 | 29.8 | — | 25.03 |
| ASGPR ligand | | | | | |
| Lot: PF-07075667 | | | | | |
| HATU | 382 | 1.8 | 8.6 | — | 22.53 |
| P/N Sigma 445460 | | | | | |
| Lot: MKBV8272V | | | | | |
| DIEA | 129 | 10.0 | 16.14 | 22.24 | 125.14 |
| P/N Sigma 387649 | | | | | |
| Lot: SHBG2052V | | | | | |
| Dimethylformamide | — | — | — | 1500 | — |

TABLE 2
Aqueous Oligonucleotide Solution

| Oligonucleotide/ | Conc | Total volume | |
|---|---|---|---|
| Solvent | (mg/mL) | (mL) | Total mg |
| WV-7107.01 in water | 60 | 1.5 | 90 |

[1923] Weighed the Bis-antennary PFE ASGPR ligand (18-(17-((1S,2R,3R,4R,5S)-4-acetamido-2,3-dihydroxy-6,8-dioxabicyclo[3.2.1]octan-1-yl)-5,11-dioxo-2,16-dioxa-6,10-diazaheptadecyl)-1-((1S,2R,3R,4R,5S)-4-acetamido-2,3-dihydroxy-6,8-dioxabicyclo[3.2.1]octan-1-yl)-7,13,20-trioxo-2,16-dioxa-8,12,19-triazahentriacontan-31-oic acid) (2.0 eq), and HATU (1.8 eq) and transferred to a 50 mL tube. Dissolved the material in anhydrous Dimethylformamide (1.5 mL) then add DIEA (d=0.742) (10 eq) into the tube. The solution was sonicated till it became clear, and it was stirred for 20 min at 37° C. Reconstituted WV-7107 sample with 1.5 mL water. Then the Bis-antennary PFE ASGPR ligand mixture was added to sample WV-7107 and stirred for 1 hr at 37° C. The progress of the reaction was monitored by UPLC. The reaction was completed after 1 hr incubation. Formation of the final product WV-9544 was confirmed by UPLC and Mass Spectrometry. The conjugated samples were purified by anion exchange chromatography. Observed Mass: 8367.2 (Deconvoluted), Target Mass: 8364.1.

### Example 37F. Synthesis of WV-9545

### Protocol for PFE Conjugation

[1924] Precursor material: WV-7107.02

[1925] Final Conjugated product: WV-9545.01

### Reagents for Conjugation

| | | Equivalent | | | |
|---|---|---|---|---|---|
| Oligonucleotide/ | | to Oligo- | | | |
| Reagents | MW | nucleotide | mg | μL | μmole |
| WV-7107.02 | 7191.7 | 1 | 90 | — | 12.51 |
| Mono GalNAc | 830.97 | 2 | 20.8 | — | 25.03 |
| Lot: PF-07075574 | | | | | |
| HATU | 382 | 1.8 | 8.6 | — | 22.53 |
| P/N Sigma 445460 | | | | | |
| Lot: MKBV8272V | | | | | |
| DIEA | 129 | 10.0 | 16.14 | 22.24 | 125.14 |
| P/N Sigma 387649 | | | | | |
| Lot: SHBG2052V | | | | | |
| Dimethylformamide | — | — | — | 1500 | — |

TABLE 2
Aqueous Oligonucleotide Solution

| Oligonucleotide/ | Conc | Total volume | |
|---|---|---|---|
| Solvent | (mg/mL) | (mL) | Total mg |
| WV-7107.01 in water | 60 | 1.5 | 90 |

[1927] Weighed the Mono GalNAc (1-(((2R,3R,4R,5R,6R)-3-acetamido-4,5-diacetoxy-6-(acetoxymethyl)tetrahydro-2H-pyran-2-yl)oxy)-5,11,18-trioxo-14-oxa-6,10,17-triazanonacosan-29-oic acid) (2.0 eq), and HATU (1.8 eq) and transferred to a 50 mL tube. Dissolved the material in anhydrous Dimethylformamide (1.5 mL) then add DIEA (d=0.742) (10 eq) into the tube. The solution was sonicated till it became clear, and it was stirred for 20 min at 37° C. Reconstituted WV-7107 sample with 1.5 mL water. Then the Mono GalNAc ligand mixture was added to sample WV-7107 and stirred for 1 hr at 37° C. The progress of the reaction was monitored by UPLC. The reaction was completed after 1 hr incubation. The mixture was treated with concentrated Ammonium hydroxide (2 mL) for deprotection by incubating for 1 h at 37° C. Formation of the final product WV-9545 was confirmed by UPLC and Mass Spectrometry. The conjugated samples were purified by anion exchange chromatography. Observed Mass: 7881.3 (Deconvoluted), Target Mass: 7878.6.

### Example 37G. Synthesis of WV-9546

### Protocol for PFE Conjugation

[1928] Precursor material: WV-7107.02

[1929] Final Conjugated product: WV-9546.01

### Reagents for Conjugation

| | | Equivalent | | | |
|---|---|---|---|---|---|
| Oligonucleotide/ | | to Oligo- | | | |
| Reagents | MW | nucleotide | mg | μL | μmole |
| WV-7107.02 | 7191.7 | 1 | 90 | — | 12.51 |
| Mono PFE ASGPR | 716.87 | 2 | 17.9 | — | 25.03 |
| ligand | | | | | |
| Lot: PF-07075666 | | | | | |
| HATU | 382 | 1.8 | 8.6 | — | 22.53 |
| P/N Sigma 445460 | | | | | |
| Lot: MKBV8272V | | | | | |
| DIEA | 129 | 10.0 | 16.14 | 22.24 | 125.14 |
| P/N Sigma 387649 | | | | | |
| Lot: SHBG2052V | | | | | |
| Dimethylformamide | — | — | — | 1500 | — |

TABLE 2
Aqueous Oligonucleotide Solution

| Oligonucleotide/ | Conc | Total volume | |
|---|---|---|---|
| Solvent | (mg/mL) | (mL) | Total mg |
| WV-7107.01 in water | 60 | 1.5 | 90 |

[1931] Weighed the Mono PFE ASGPR ligand (1-((1S,2R,3R,4R,5S)-4-acetamido-2,3-dihydroxy-6,8-dioxabicyclo[3.2.1]octan-1-yl)-7,13,20-trioxo-2,16-dioxa-8,12,19-triazahentriacontan-31-oic acid) (2.0 eq), and HATU (1.8 eq) and transferred to a 50 mL tube. Dissolved the material in anhydrous Dimethylformamide (1.5 mL) then add DIEA (d=0.742) (10 eq) into the tube. The solution was sonicated till it became clear, and it was stirred for 20 min at 37° C. Reconstituted WV-7107 sample with 1.5 mL water. Then the Mono GalNAc ligand mixture was added to sample WV-7107 and stirred for 1 hr at 37° C. The progress of the reaction was monitored by UPLC. The reaction was completed after 1 hr incubation. Formation of the final product WV-9546 was confirmed by UPLC and Mass Spectrometry. The conjugated samples were purified by anion exchange chromatography. Observed Mass: 7893.1 (Deconvoluted), Target Mass: 7890.6.

### Example 37H. IEX Purification Condition

### For Sample WV-9542

| Buffer A | 20 mM Sodium Hydroxide | |
|---|---|---|
| Buffer B | 2.5N sodium chloride in 20 mM Sodium hydroxide | |
| Column | 2.5 cm × 33 cm Source 15Q | |
| Gradient | % B | Column Vol (160 mL) |
| | 0 | 2 |
| | 0-15 | 2 |
| | 15 | 1 |
| | 15-90 | 15 |
| | 100 | 1 |

### For Sample WV-6558, WV-9542-WV-9546

| Buffer A | 20 mM Sodium Hydroxide | |
|---|---|---|
| Buffer B | 2.5N sodium chloride in 20 mM Sodium hydroxide | |
| Column | 2.0 cm × 10 cm Source 15Q | |
| Gradient | % B | Column Vol (160 mL) |
| | 0 | 2 |
| | 0-20 | 5 |
| | 20 | 1 |
| | 20-90 | 15 |
| | 100 | 1 |

### Example 38. Synthesis of Ligand

### Synthesis of 1-(((2R,3R,4R,5R,6R)-3-acetamido-4,5-diacetoxy-6-(acetoxymethyl)tetrahydro-2H-pyran-2-yl)oxy)-16,16-bis((3-((3-(5-(((2R,3R,4R,5R,6R)-3-acetamido-4,5-diacetoxy-6-(acetoxymethyl)tetrahydro-2H-pyran-2-yl)oxy)pentanamido)propyl)amino)-3-oxopropoxy)methyl)-5,11,18-trioxo-14-oxa-6,10,17-triazanonacosan-29-oic acid

[chemical structure]

### Step 1

[1935] To a solution of di-tert-butyl 3,3′-((2-amino-2-((3-(tert-butoxy)-3-oxopropoxy)methyl)propane-1,3-diyl)bis(oxy))dipropanoate (5.0 g, 9.89 mmol) and 12-methoxy-12-oxododecanoic acid (2.416 g, 9.89 mmol) in DMF (45 mL) was added HATU (3.76 g, 9.89 mmol) and DIPEA (2.58 ml, 14.83 mmol). The reaction mixture was stirred at room temperature for 5 hrs. Solvent was concentrated under reduced pressure, and diluted with brine, extracted with EtOAc, dried over anhydrous sodium sulfate, and concentrated to give a residue, which was purified by ISCO (120 g gold silica gel cartridge) eluting with 10% EtOAc in hexane to 40% EtOAc in hexane to give di-tert-butyl 3,3′-((2-((3-(tert-butoxy)-3-oxopropoxy)methyl)-2-(12-methoxy-12-oxododecanamido)propane-1,3-diyl)bis(oxy))dipropanoate (5.13 g, 7.01 mmol, 70.9% yield) as a colorless oil. ¹H NMR (400 MHz, Chloroform-d) δ 6.03 (s, 1H), 3.74-3.61 (m, 15H), 2.45 (t, J=6.3 Hz, 6H), 2.31 (td, J=7.5, 3.9 Hz, 2H), 2.19-2.10 (m, 2H), 1.64-1.59 (m, 4H), 1.46 (s, 27H), 1.32-1.24 (m, 12H); MS (ESI), 732.6 (M+H)⁺.

### Step 2

[1936] A solution of di-tert-butyl 3,3′-((2-((3-(tert-butoxy)-3-oxopropoxy)methyl)-2-(12-methoxy-12-oxododecanamido)propane-1,3-diyl)bis(oxy))dipropanoate (5.0 g, 6.83 mmol) in formic acid (50 mL) was stirred at room temperature for 48 hrs. Solvent was evaporated under reduced pressure, co-evaporated with toluene (3×) to give a white solid, which was dried under high vacuum for 2 days. LC-MS and H NMR showed the reaction is not complete. The crude product was redissolved in formic acid (50 mL). The reaction mixture was stirred at room temperature for 24 hrs. LC-MS showed the reaction was complete. Solvent was evaporated under reduced pressure, co-evaporated with toluene (3×), dried over high vacuum to give 3,3′-((2-((2-carboxyethoxy)methyl)-2-(12-methoxy-12-oxododecanamido)propane-1,3-diyl)bis(oxy))dipropanoic acid (4.00 g) as a white solid. MS (ESI): 562.4 (M−H)⁻.

### Step 3

[1937] A solution of 3,3′-((2-((2-carboxyethoxy)methyl)-2-(12-methoxy-12-oxododecanamido)propane-1,3-diyl)bis(oxy))dipropanoic acid (3.85 g, 6.83 mmol) and HOBt (3.88 g, 28.7 mmol) in DCM (60 mL) and DMF (15 mL) at 0° C. was added tert-butyl (3-aminopropyl)carbamate (4.76 g, 27.3 mmol), EDAC HCl salt (5.24 g, 27.3 mmol) and DIPEA (8.33 ml, 47.8 mmol). The reaction mixture was stirred at 0° C. for 15 minutes and at room temperature for 20 hrs. LC-MS showed the reaction was not complete. t-Butyl (3-mainopropyl) carbamate (1.59 g, 9.12 mmol) and EDC HCl salt (1.75 g, 9.13 mol) was added into the reaction mixture. The reaction mixture was continually stirred at room temperature for 4 hrs. Solvent was evaporated to give a residue, which was dissolved in EtOAc (300 mL), washed with water (1×), saturated sodium bicarbonate (2×), 10% citric acid (2×) and water, dried over sodium sulfate, and concentrated to give a residue which was purified by ISCO (80 g gold cartridge) eluting with DCM to 30% MeOH in DCM to give methyl 15,15-bis(13,13-dimethyl-5,11-dioxo-2,12-dioxa-6,10-diazatetradecyl)-2,2-dimethyl-4,10,17-trioxo-3,13-dioxa-5,9,16-triazaoctacosan-28-oate (6.61 g, 6.40 mmol, 94% yield over 2 steps) as a white solid. MS (ESI): 1033.5 (M+H)+.

### Step 4

[1938] To a solution of methyl 15,15-bis(13,13-dimethyl-5,11-dioxo-2,12-dioxa-6,10-diazatetradecyl)-2,2-dimethyl-4,10,17-trioxo-3,13-dioxa-5,9,16-triazaoctacosan-28-oate (6.56 g, 6.35 mmol) in THF (75 mL) was added aq. LiOH (0.457 g, 19.06 mmol) in water (25 mL). The mixture was stirred at room temperature for overnight. LC-MS showed the reaction was completed. Solvent was evaporated, acidified using 1 N HCl (45 mL), extracted with DCM (3×), dried over anhydrous sodium sulfate, concentrated to give 15,15-bis(13,13-dimethyl-5,11-dioxo-2,12-dioxa-6,10-diazatetradecyl)-2,2-dimethyl-4,10,17-trioxo-3,13-dioxa-5,9,16-triazaoctacosan-28-oic acid (6.31 g, 6.20 mmol, 98% yield) as a white solid. MS (ESI): 1019.6 (M+H)⁺.

### Step 5

[1939] To a solution of 15,15-bis(13,13-dimethyl-5,11-dioxo-2,12-dioxa-6,10-diazatetradecyl)-2,2-dimethyl-4,10,17-trioxo-3,13-dioxa-5,9,16-triazaoctacosan-28-oic acid (6.31 g, 6.20 mmol) and (bromomethyl)benzene (1.272 g, 7.44 mmol) in DMF (40 mL) was added K₂CO₃ (2.57 g, 18.59 mmol). The mixture was stirred at 40° C. for 4 hrs and at room temperature for overnight. Solvent was evaporated under reduced pressure. The reaction mixture was diluted with EtOAc, washed with water, dried over anhydrous sodium sulfate, concentrated under reduced pressure to give a residue, which was purified by ISCO (80 g cartridge) eluting with DCM to 30% MeOH in DCM to give benzyl 15,15-bis(13,13-dimethyl-5,11-dioxo-2,12-dioxa-6,10-diazatetradecyl)-2,2-dimethyl-4,10,17-trioxo-3,13-dioxa-5,9,16-triazaoctacosan-28-oate (6.41 g, 5.78 mmol, 93% yield) as a colorless oil. ¹H NMR (400 MHz, DMSO-d₆) δ 7.80 (t, J=5.7 Hz, 3H), 7.39-7.30 (m, 5H), 6.95 (s, 1H), 6.74 (t, J=5.8 Hz, 3H), 5.07 (s, 2H), 3.53 (J, J=7.3 Hz, 6H), 3.51 (s, 6H), 3.02 (q, J=6.7 Hz, 6H), 2.94-2.85 (m, 6H), 2.29 (dt, J=26.1, 6.9 Hz, 8H), 2.02 (q, J=9.7, 8.6 Hz, 2H), 1.56-1.39 (m, 10H), 1.35 (s, 27H), 1.20 (brs, 14H); MS (ESI): 1019.6 (M+H)+.

### Step 6

[1940] To a solution of benzyl 15,15-bis(13,13-dimethyl-5,11-dioxo-2,12-dioxa-6,10-diazatetradecyl)-2,2-dimethyl-4,10,17-trioxo-3,13-dioxa-5,9,16-triazaoctacosan-28-oate (2.42 g, 2.183 mmol) in DCM (40 mL) was added 2,2,2-trifluoroacetic acid (8 ml, 105 mmol). The reaction mixture was stirred at room temperature for overnight. Solvent was evaporated under reduced pressure, co-evaporated with toluene (2×), triturated with ether, dried under high vacuum for overnight. Directly use TFA salt for next step.

### Step 7

[1941] To a solution of 5-(((2R,3R,4R,5R,6R)-3-acetamido-4,5-diacetoxy-6-(acetoxymethyl)tetrahydro-2H-pyran-2-yl)oxy)pentanoic acid (3.91 g, 8.73 mmol), HBTU (3.48 g, 9.17 mmol) and HOBT (1.239 g, 9.17 mmol) in DCM (25 mL) was added DIPEA (6.08 ml, 34.9 mmol) followed by benzyl 12-((1,19-diamino-10-((3-((3-aminopropyl)amino)-3-oxopropoxy)methyl)-5,15-dioxo-8,12-dioxa-4,16-diazanonadecan-10-yl)amino)-12-oxododecanoate (1.764 g, 2.183 mmol) in DMF (4.0 mL). The mixture was stirred at room temperature for 5 hrs. Solvent was evaporated under reduced pressure to give a residue, which was purified by ISCO (40 g gold column) eluting with 5% MeOH in DCM for 5 column value to remove HOBt followed by 5% to 30% MeOH in DCM to give 1-(((2R,3R,4R,5R,6R)-3-acetamido-4,5-diacetoxy-6-(acetoxymethyl)tetrahydro-2H-pyran-2-yl)oxy)-16,16-bis((3-((3-(5-(((2R,3R,4R,5R,6R)-3-acetamido-4,5-diacetoxy-6-(acetoxymethyl)tetrahydro-2H-pyran-2-yl)oxy)pentanamido)propyl)amino)-3-oxopropoxy)methyl)-5,11,18-trioxo-14-oxa-6,10,17-triazanonacosan-29-oic benzyl ester (3.98 g, 87% yield) as a white solid. ¹H NMR (400 MHz, DMSO-d₆) δ 7.82-7.74 (m, 6H), 7.69 (t, J=5.6 Hz, 3H), 7.33-7.27 (m, 5H), 6.94 (s, 1H), 5.16 (d, J=3.4 Hz, 3H), 5.03 (s, 2H), 4.92 (dd, J=11.2, 3.4 Hz, 3H), 4.43 (d, J=8.4 Hz, 3H), 4.02-3.95 (m, 9H), 3.82 (dt, J=11.2, 8.8 Hz, 3H), 3.65 (dt, J=10.5, 5.6 Hz, 3H), 3.51-3.44 (m, 12H), 3.36 (dt, J=9.6, 6.0 Hz, 3H), 3.01-2.95 (m, 12H), 2.29 (t, J=7.4 Hz, 2H), 2.23 (t, J=6.3 Hz, 6H), 2.05 (s, 9H), 1.99 (t, J=7.0 Hz, 8H), 1.94 (s, 9H), 1.84 (s, 9H), 1.72 (s, 9H), 1.50-1.14 (m, 34H); MS (ESI): 1049.0 (M/2+H)+.

### Step 8

[1942] To a round bottom flask flushed with Ar was added 10% Pd/C (165 mg, 0.835 mmol) and EtOAc (15 mL). A solution of Benzyl protected tris-GalNAc (1.75 g, 0.835 mmol) in methanol (15 mL) was added followed by triethylsilane (2.67 ml, 16.70 mmol) dropwise. The mixture was stirred at room temperature for 3 hrs. LC-MS showed the reaction was complete, diluted with EtOAc, and filtered through celite, washed with 20% MeOH in EtOAc, concentrated under reduced pressure to give 1-(((2R,3R,4R,5R,6R)-3-acetamido-4,5-diacetoxy-6-(acetoxymethyl)tetrahydro-2H-pyran-2-yl)oxy)-16,16-bis((3-((3-(5-(((2R,3R,4R,5R,6R)-3-acetamido-4,5-diacetoxy-6-(acetoxymethyl)tetrahydro-2H-pyran-2-yl)oxy)pentanamido)propyl)amino)-3-oxopropoxy)methyl)-5,11,18-trioxo-14-oxa-6,10,17-triazanonacosan-29-oic acid (1.67 g, 0.832 mmol, 100% yield) as a white solid. ¹H NMR (400 MHz, DMSO-d₆) δ 11.95 (s, 1H), 7.83-7.74 (m, 6H), 7.69 (t, J=5.7 Hz, 3H), 6.93 (s, 1H), 5.16 (d, J=3.4 Hz, 3H), 4.92 (dd, J=11.2, 3.4 Hz, 3H), 4.43 (d, J=8.4 Hz, 3H), 4.01-3.94 (m, 9H), 3.82 (dt, J=11.3, 8.8 Hz, 3H), 3.66 (dt, J=10.7, 5.6 Hz, 3H), 3.54-3.43 (m, 12H), 3.41-3.33 (m, 3H), 3.03-2.94 (m, 12H), 2.24 (t, J=7.4 Hz, 10H), 2.14 (t, J=7.4 Hz, 2H), 2.06 (s, 9H), 2.00 (t, J=7.2 Hz, 8H), 1.95 (s, 9H), 1.84 (s, 9H), 1.73 (s, 9H), 1.51-1.14 (m, 34H). MS (ESI): 1003.8 (M/2+H)+.

### Example 39. Synthesis of Ligand

### Synthesis of 18,18-bis(17-((1S,2R,3R,4R,5S)-4-acetamido-2,3-dihydroxy-6,8-dioxabicyclo[3.2.1]octan-1-yl)-5,11-dioxo-2,16-dioxa-6,10-diazaheptadecyl)-1-((1S,2R,3R,4R,5S)-4-acetamido-2,3-dihydroxy-6,8-dioxabicyclo[3.2.1]octan-1-yl)-7,13,20-trioxo-2,16-dioxa-8,12,19-triazatetracosan-24-oic acid

[chemical structure]

### Step 1

[1944] To a solution of tert-butyl 5-bromopentanoate (4.0 g, 16.87 mmol) in acetone (80 mL) was added NaI (7.59 g, 50.6 mmol). The reaction mixture was stirred at 57° C. for 2 hrs, filtered, and washed with EtOAc. Solvent was evaporated under reduced pressure to give a residue, which was dissolved in EtOAc, washed with water, brine, dried over Na₂SO₄, concentrated to give a residue, which was purified by ISCO (40 g column) eluting with 20% EtOAc in hexane to 50% EtOAc in hexane to give tert-butyl 5-iodopentanoate 6 (4.54 g, 15.98 mmol, 95% yield) as a yellow oil. ¹H NMR (500 MHz, Chloroform-d) δ 3.19 (t, J=6.9 Hz, 2H), 2.24 (t, J=7.3 Hz, 2H), 1.86 (p, J=7.1 Hz, 2H), 1.70 (p, J=7.4 Hz, 2H), 1.45 (s, 9H).

### Step 2

[1945] To a solution of N-((1S,2R,3R,4R,5S)-2,3-dihydroxy-1-(hydroxymethyl)-6,8-dioxabicyclo[3.2.1]octan-4-yl)acetamide (600 mg, 2.57 mmol) in DMF (15 mL) was added 2,2-dimethoxypropane (2087 μl, 17.03 mmol) followed by (+/−)-camphor-10-sulphonic acid (264 mg, 1.135 mmol). The reaction mixture was stirred at 70° C. for 24 hrs. The reaction mixture was cooled down to room temperature, and then methanol (2.5 mL) was added. The reaction mixture was stirred at room temperature for 30 minutes and neutralized with TEA (0.10 mL). The solvent was evaporated and the residue was coevaporated with toluene. The residue was purified by ISCO (24 g gold) eluting with EtOAc to 10% MeOH in EtOAc to give N-((3aR,4S,7S,8R,8aR)-4-(hydroxymethyl)-2,2-dimethylhexahydro-4,7-epoxy[1,3]dioxolo[4,5-d]oxepin-8-yl)acetamide 7 (666 mg, 2.437 mmol, 95% yield). ¹H NMR (500 MHz, DMSO-d₆) δ 8.09 (d, J=8.1 Hz, 1H), 5.15-5.05 (m, 2H), 4.26 (d, J=5.8 Hz, 1H), 4.09 (dd, J=7.3, 5.8 Hz, 1H), 3.80-3.60 (m, 5H), 1.83 (s, 3H), 1.37 (s, 3H), 1.26 (s, 3H); MS, 274.3 (M+H)+.

### Step 3

[1946] To a solution of tert-butyl 5-iodopentanoate (1310 mg, 4.61 mmol) and N-((3aR,4S,7S,8R,8aR)-4-(hydroxymethyl)-2,2-dimethylhexahydro-4,7-epoxy[1,3]dioxolo[4,5-d]oxepin-8-yl)acetamide 7 (420 mg, 1.537 mmol) in DCM (10.5 mL) was added tetrabutylammonium hydrogensulfate (783 mg, 2.305 mmol) followed by 12.5 M sodium hydroxide solution (7 mL). The reaction mixture was stirred at room temperature for 24 hrs. The reaction mixture was diluted with DCM and water, extracted with DCM (2×).

[1947] The organic layer was washed with 1 N HCl solution, and dried over sodium sulfate. Solvent was concentrated under reduce pressure to give a residue. The resulting crude material was added ethyl acetate (30 mL) and sonicated for 5 minutes. The result precipitate was filtered, washed with ethyl acetate (10 mL×2). LC MS showed the filter doens't contain desired product and was tetrabutylammonium salt. The filtrate was concentrated under reduced pressure to give a residue, which was purified by ISCO (40 g silica gel gold cartridge) eluting with 50% EtOAc in hexane to EtOAc to give tert-butyl 5-(((3aR,4S,7S,8R,8aR)-8-acetamido-2,2-dimethylhexahydro-4,7-epoxy[1,3]dioxolo[4,5-d]oxepin-4-yl)methoxy)pentanoate (0.470 g, 1.094 mmol, 71.2% yield) as a yellowish oil. ¹H NMR (500 MHz, Chloroform-d) δ 5.56 (d, J=9.1 Hz, 1H), 4.21 (d, J=5.9 Hz, 1H), 4.12 (dtd, J=7.7, 3.8, 1.7 Hz, 1H), 3.99 (t, J=6.3 Hz, 1H), 3.90 (d, J=9.5 Hz, 1H), 3.77 (d, J=2.0 Hz, 2H), 3.67 (d, J=9.5 Hz, 1H), 3.52 (ddt, J=30.5, 9.2, 5.8 Hz, 2H), 2.23 (t, J=7.1 Hz, 2H), 2.03 (d, J=14.5 Hz, 3H), 1.65-1.55 (m, 7H), 1.44 (s, 9H), 1.35 (s, 3H); MS, 452.4 (M+Na)+.

### Step 4

[1948] To a solution of benzyl 15,15-bis(13,13-dimethyl-5,11-dioxo-2,12-dioxa-6,10-diazatetradecyl)-2,2-dimethyl-4,10,17-trioxo-3,13-dioxa-5,9,16-triazahenicosan-21-oate (0.168 g, 0.166 mmol) in DCM (3 mL) was added TFA (3 mL). The reaction mixture was stirred at room temperature for 3 hrs. LC-MS showed the reaction was completed. Solvent was evaporated under reduced pressure to give benzyl 5-((1,19-diamino-10-((3-((3-aminopropyl)amino)-3-oxopropoxy)methyl)-5,15-dioxo-8,12-dioxa-4,16-diazanonadecan-10-yl)amino)-5-oxopentanoate as a colorless oil. MS, 710.5 (M+H)+. Directly use for next step without purification.

### Step 5

[1949] To a solution of tert-butyl 5-(((3aR,4S,7S,8R,8aR)-8-acetamido-2,2-dimethylhexahydro-4,7-epoxy[1,3]dioxolo[4,5-d]oxepin-4-yl)methoxy)pentanoate (285 mg, 0.664 mmol) in DCM (5 mL) was added TFA (5 mL) was stirred at room temperature for 4 hrs. LC-MS showed the reaction was complete. Solvent was evaporated to give 5-(((1S,2R,3R,4R,5S)-4-acetamido-2,3-dihydroxy-6,8-dioxabicyclo[3.2.1]octan-1-yl)methoxy)pentanoic acid. MS (ESI): 334.3 (M+H)+. Directly use for next step without purification.

### Step 6

[1950] To a solution of 5-(((1S,2R,3R,4R,5S)-4-acetamido-2,3-dihydroxy-6,8-dioxabicyclo[3.2.1]octan-1-yl)methoxy)pentanoic acid (221 mg, 0.664 mmol) in DCM (10 mL) was added DIPEA (2313 μl, 13.28 mmol), HBTU (208 mg, 0.548 mmol), HOBT (67.3 mg, 0.498 mmol), a solution of benzyl 5-((1,19-diamino-10-((3-((3-aminopropyl)amino)-3-oxopropoxy)methyl)-5,15-dioxo-8,12-dioxa-4,16-diazanonadecan-10-yl)amino)-5-oxopentanoate (118 mg, 0.166 mmol) (GL08-02) in DMF (3.0 mL) and DCM (5.0 mL). The reaction mixture was stirred at room temperature for overnight. LC-MS showed the desired product. Solvent was evaporated under reduced pressure to give a residue, which was purified by ISCO (24 g gold cartridge) eluting with DCM to 80% MeOH in DCM to give benzyl 18,18-bis(17-((1S,2R,3R,4R,5S)-4-acetamido-2,3-dihydroxy-6,8-dioxabicyclo[3.2.1]octan-1-yl)-5,11-dioxo-2,16-dioxa-6,10-diazaheptadecyl)-1-((1S,2R,3R,4R,5S)-4-acetamido-2,3-dihydroxy-6,8-dioxabicyclo[3.2.1]octan-1-yl)-7,13,20-trioxo-2,16-dioxa-8,12,19-triazatetracosan-24-oate (272 mg, 0.164 mmol, 99% yield) (product @ tube 30 to 42 (40% MeOH in DCM to 60% MeOH in DCM)

[1951] ¹H NMR (500 MHz, DMSO-d₆) δ 7.89 (d, J=7.8 Hz, 3H), 7.81 (t, J=5.7 Hz, 3H), 7.75 (s, 3H), 7.34 (q, J=7.5, 6.9 Hz, 5H), 7.05 (s, 1H), 5.07 (s, 5H), 4.83 (d, J=5.3 Hz, 3H), 4.56 (d, J=7.1 Hz, 3H), 3.73 (dd, J=23.3, 9.2 Hz, 6H), 3.64 (d, J=7.0 Hz, 6H), 3.58-3.35 (m, 27H), 3.02 (p, J=6.2 Hz, 12H), 2.33 (t, J=7.6 Hz, 2H), 2.26 (t, J=6.4 Hz, 6H), 2.10 (t, J=7.6 Hz, 2H), 2.04 (t, J=7.4 Hz, 6H), 1.82 (s, 9H), 1.72 (q, J=7.6 Hz, 2H), 1.52-1.39 (m, 18H); MS (ESI), 1656.3 (M+H)⁺.

### Step 7

[1952] To a solution of benzyl 18,18-bis(17-((1S,2R,3R,4R,5S)-4-acetamido-2,3-dihydroxy-6,8-dioxabicyclo[3.2.1]octan-1-yl)-5,11-dioxo-2,16-dioxa-6,10-diazaheptadecyl)-1-((1S,2R,3R,4R,5S)-4-acetamido-2,3-dihydroxy-6,8-dioxabicyclo[3.2.1]octan-1-yl)-7,13,20-trioxo-2,16-dioxa-8,12,19-triazatetracosan-24-oate (270 mg, 0.163 mmol) in EtOAc (10 mL) was added 10% Pd—C(50 mg), and MeOH (5.0 mL), and triethylsilane (1042 μl, 6.52 mmol). The reaction mixture was stirred at room temperature for 1 hr, filtered, and concentrated to give 18,18-bis(17-((1S,2R,3R,4R,5S)-4-acetamido-2,3-dihydroxy-6,8-dioxabicyclo[3.2.1]octan-1-yl)-5,11-dioxo-2,16-dioxa-6,10-diazaheptadecyl)-1-((1S,2R,3R,4R,5S)-4-acetamido-2,3-dihydroxy-6,8-dioxabicyclo[3.2.1]octan-1-yl)-7,13,20-trioxo-2,16-dioxa-8,12,19-triazatetracosan-24-oic acid (246 mg, 0.157 mmol, 96% yield) as a white solid. ¹H NMR (500 MHz, DMSO-d₆) δ 11.99 (brs, 1H), 7.89 (d, J=7.9 Hz, 3H), 7.82 (t, J=5.4 Hz, 3H), 7.75 (t, J=5.7 Hz, 3H), 7.03 (s, 1H), 5.07 (d, J=1.6 Hz, 3H), 4.83 (brs, 3H), 4.56 (brs, 3H), 3.79-3.68 (m, 6H), 3.64 (d, J=7.2 Hz, 6H), 3.58-3.34 (m, 27H), 3.02 (p, J=6.3 Hz, 12H), 2.27 (t, J=6.4 Hz, 6H), 2.17 (t, J=7.5 Hz, 2H), 2.08 (t, J=7.5 Hz, 2H), 2.04 (t, J=7.3 Hz, 6H), 1.82 (s, 9H), 1.65 (p, J=7.5 Hz, 2H), 1.54-1.40 (m, 18H); MS(ESI), 1566.3 (M+H)+.

### Example 40. Synthesis of Ligand

### Synthesis of 18,18-bis(17-((1S,2R,3R,4R,5S)-4-acetamido-2,3-dihydroxy-6,8-dioxabicyclo[3.2.1]octan-1-yl)-5,11-dioxo-2,16-dioxa-6,10-diazaheptadecyl)-1-((1S,2R,3R,4R,5S)-4-acetamido-2,3-dihydroxy-6,8-dioxabicyclo[3.2.1]octan-1-yl)-7,13,20-trioxo-2,16-dioxa-8,12,19-triazahentriacontan-31-oic acid

[chemical structure]

[1954] 18,18-bis(17-((1S,2R,3R,4R,5 S)-4-acetamido-2,3-dihydroxy-6,8-dioxabicyclo[3.2.1]octan-1-yl)-5,11-dioxo-2,16-dioxa-6,10-diazaheptadecyl)-1-((1S,2R,3R,4R,5 S)-4-acetamido-2,3-dihydroxy-6,8-dioxabicyclo[3.2.1]octan-1-yl)-7,13,20-trioxo-2,16-dioxa-8,12,19-triazahentriacontan-31-oic acid was synthesized using the same procedure as 18,18-bis(17-((1S,2R,3R,4R,5S)-4-acetamido-2,3-dihydroxy-6,8-dioxabicyclo[3.2.1]octan-1-yl)-5,11-dioxo-2,16-dioxa-6,10-diazaheptadecyl)-14(1S,2R,3R,4R,5 S)-4-acetamido-2,3-dihydroxy-6,8-dioxabicyclo[3.2.1]octan-1-yl)-7,13,20-trioxo-2,16-dioxa-8,12,19-triazatetracosan-24-oic acid. ¹H NMR (400 MHz, DMSO-d₆) δ 7.90 (d, J=7.8 Hz, 3H), 7.83 (t, J=5.7 Hz, 3H), 7.76 (t, J=5.7 Hz, 3H), 6.98 (d, J=6.2 Hz, 1H), 5.09 (s, 3H), 3.81-3.69 (m, 6H), 3.69-3.62 (m, 6H), 3.62-3.40 (m, 24H), 3.04 (p, J=6.1 Hz, 9H), 2.28 (t, J=6.4 Hz, 4H), 2.18 (t, J=7.3 Hz, 2H), 2.06 (t, J=7.7 Hz, 6H), 1.84 (s, 6H), 1.48 (tq, J=14.9, 7.4 Hz, 16H), 1.23 (s, 8H). MS(ESI), 1664.0 (M+H)⁺.

### EQUIVALENTS

[1955] Having described some illustrative embodiments of the present disclosure, it should be apparent to those skilled in the art that the foregoing is merely illustrative and not limiting, having been presented by way of example only. Numerous modifications and other illustrative embodiments are within the scope of one of ordinary skill in the art and are contemplated as falling within the scope of the disclosure. In particular, although many of the examples presented herein involve specific combinations of method acts or system elements, it should be understood that those acts and those elements may be combined in other ways to accomplish the same objectives. Acts, elements, and features discussed only in connection with one embodiment are not intended to be excluded from a similar role in other embodiments. Further, for the one or more means-plus-function limitations recited, for example, in claimed inventions, if any, the means are not intended to be limited to the means disclosed herein for performing the recited function, but are intended to cover in scope any means, known now or later developed, for performing the recited function.

[1956] Use of ordinal terms such as “first”, “second”, “third”, etc., in claims to modify a claim element does not by itself connote any priority, precedence, or order of one claim element over another or the temporal order in which acts of a method are performed, but are used merely as labels to distinguish one claim element having a certain name from another element having a same name (but for use of the ordinal term) to distinguish the claim elements. Similarly, use of a), b), etc., or i), ii), etc. does not by itself connote any priority, precedence, or order of steps in the claims. Similarly, use of these terms in the specification does not by itself connote any required priority, precedence, or order. Neither does use of any such terms indicate number of elements in described (including claimed) inventions.

[1957] The foregoing written specification is sufficient to enable one skilled in the art to practice any invention described in the present disclosure. The present disclosure is not to be limited in scope by examples provided, which are intended as illustrations of one or more aspects of described inventions and other functionally equivalent embodiments are within the scope of described inventions. Various modifications of described inventions in addition to those shown and described herein will become apparent to those skilled in the art from the foregoing description and fall within the scope of described inventions. Advantages and objects of described inventions are not necessarily encompassed by each embodiment of described inventions.

[1958] The foregoing written specification is considered to be sufficient to enable one skilled in the art to practice the invention. The present disclosure is not to be limited in scope by examples provided, since the examples are intended as a single illustration of one aspect of the invention and other functionally equivalent embodiments are within the scope of the invention. Various modifications of the invention in addition to those shown and described herein will become apparent to those skilled in the art from the foregoing description and fall within the scope of the appended Embodiments. The advantages and objects of the invention are not necessarily encompassed by each embodiment of the invention.

[1959] Throughout this application, various publications are referenced. The disclosures of these publications in their entireties are hereby incorporated by reference into this application for all purposes.

1.-72. (canceled)

73. A composition comprising oligonucleotides of a particular oligonucleotide type characterized by:
a) a common base sequence;
b) a common pattern of backbone linkages;
c) a common pattern of backbone chiral centers;
wherein the oligonucleotide comprises at least one internucleotidic linkage comprising a linkage phosphorus in the Sp configuration;
wherein the composition is chirally controlled in that it is enriched, relative to a substantially racemic preparation of oligonucleotides having the same common base sequence, for oligonucleotides of the particular oligonucleotide type; and
wherein the oligonucleotide targets APOC3.

74. A composition comprising a plurality of oligonucleotides, wherein oligonucleotides of the plurality share:
1) a common base sequence, and
2) the same linkage phosphorus stereochemistry independently at one or more (e.g., about 1-50, 1-40, 1-30, 1-25, 1-20, 1-15, 1-10, 5-50, 5-40, 5-30, 5-25, 5-20, 5-15, 5-10, 1, 2, 3, 4, 5, 6, 7, 8, 9, 10, 11, 12, 13, 14, 15, 16, 17, 18, 19, 20, 21, 22, 23, 24, or 25 or more) chiral internucleotidic linkages (“chirally controlled internucleotidic linkages”);
wherein about 1%-100%, (e.g., about 5%-100%, 10%-100%, 20%-100%, 30%-100%, 40%-100%, 50%-100%, 60%-100%, 70%-100%, 80-100%, 90-100%, 95-100%, 50%-90%, or about 5%, 10%, 20%, 30%, 40%, 50%, 60%, 70%, 80%, 85%, 90%, 91%, 92%, 93%, 94%, 95%, 96%, 97%, 98%, 99%, or 100%, or at least 5%, 10%, 20%, 30%, 40%, 50%, 60%, 70%, 80%, 85%, 90%, 91%, 92%, 93%, 94%, 95%, 96%, 97%, 98%, or 99%) of all oligonucleotides in the composition that share the common base sequence are oligonucleotides of the plurality; and
wherein the common base sequence is complementary to a portion of the base sequence of an APOC3 transcript, wherein the portion comprises 15 or more nucleobases.

75. The composition of claim 74, wherein oligonucleotides of the plurality share the same linkage phosphorus stereochemistry independently at five or more chiral internucleotidic linkages, and about 50%400% of all oligonucleotides in the composition that share the common base sequence are oligonucleotides of the plurality.

76. The composition of claim 74, wherein oligonucleotides of the plurality share the same linkage phosphorus stereochemistry independently at each phosphorothioate internucleotidic linkage.

77. The composition of claim 74, wherein oligonucleotides of the plurality are of the same constitution.

78. The composition of claim 76, wherein the composition is a liquid composition.

79. The composition of claim 74, wherein oligonucleotides of the plurality each independently comprise a targeting moiety (R^{CD}).

80. The composition of claim 79, wherein R^{CD} is

[chemical structure]

81. The composition of claim 79, wherein R^{CD} is

[chemical structure]

82. The composition of claim 79, wherein R^{CD} is of such a structure that R^{CD}—H is

[chemical structure]

83. The composition of claim 79, wherein R^{CD} is connected to the oligonucleotide or oligonucleotides through a linker.

84. The composition of claim 83, wherein the linker has the structure of

[chemical structure]

85. The composition of claim 79, wherein R^{CD} is selected from:

[chemical structure]

86. A method for treating fatty liver, nonalcoholic fatty liver disease, nonalcoholic steatohepatitis, nonalcoholic steatohepatitis with liver fibrosis, nonalcoholic steatohepatitis with cirrhosis, or nonalcoholic steatohepatitis with cirrhosis and hepatocellular carcinoma in humans comprising the step of administering to a human in need of such treatment a therapeutically effective amount of a composition of claim 74.

The application's sequence listing, which the Patent Office published only in electronic form, follows.

SEQUENCE LISTING (1959 sequences)

SEQ ID NO: 1 - RNA, 21 nt, Artificial Sequence
  Description of Artificial Sequence: Synthetic oligonucleotide
gcauagcgagcgagggaaaac

SEQ ID NO: 2 - RNA, 21 nt, Artificial Sequence
  Description of Artificial Sequence: Synthetic oligonucleotide
guuuucccucgcucgcuaugc

SEQ ID NO: 3 - RNA, 21 nt, Artificial Sequence
  Description of Artificial Sequence: Synthetic oligonucleotide
gcauagcgagcgagggaaaac

SEQ ID NO: 4 - DNA, 21 bp, Artificial Sequence
  Description of Artificial Sequence: Synthetic oligonucleotide
  Description of Combined DNA/RNA Molecule: Synthetic oligonucleotide
tuuuucccucgcucgcuautu

SEQ ID NO: 5 - RNA, 21 nt, Artificial Sequence
  Description of Artificial Sequence: Synthetic oligonucleotide
aauacugucccuuuuaagcuu

SEQ ID NO: 6 - RNA, 21 nt, Artificial Sequence
  Description of Artificial Sequence: Synthetic oligonucleotide
aauacugucccuuuuaagcuu

SEQ ID NO: 7 - RNA, 21 nt, Artificial Sequence
  Description of Artificial Sequence: Synthetic oligonucleotide
aauacugucccuuuuaagcuu

SEQ ID NO: 8 - RNA, 21 nt, Artificial Sequence
  Description of Artificial Sequence: Synthetic oligonucleotide
aauacugucccuuuuaagcuu

SEQ ID NO: 9 - RNA, 21 nt, Artificial Sequence
  Description of Artificial Sequence: Synthetic oligonucleotide
aauacugucccuuuuaagcuu

SEQ ID NO: 10 - RNA, 21 nt, Artificial Sequence
  Description of Artificial Sequence: Synthetic oligonucleotide
aauacugucccuuuuaagcuu

SEQ ID NO: 11 - RNA, 21 nt, Artificial Sequence
  Description of Artificial Sequence: Synthetic oligonucleotide
aauacugucccuuuuaagcuu

SEQ ID NO: 12 - RNA, 21 nt, Artificial Sequence
  Description of Artificial Sequence: Synthetic oligonucleotide
aauacugucccuuuuaagcuu

SEQ ID NO: 13 - RNA, 21 nt, Artificial Sequence
  Description of Artificial Sequence: Synthetic oligonucleotide
aauacugucccuuuuaagcuu

SEQ ID NO: 14 - RNA, 21 nt, Artificial Sequence
  Description of Artificial Sequence: Synthetic oligonucleotide
aauacugucccuuuuaagcuu

SEQ ID NO: 15 - RNA, 21 nt, Artificial Sequence
  Description of Artificial Sequence: Synthetic oligonucleotide
aauacugucccuuuuaagcuu

SEQ ID NO: 16 - RNA, 21 nt, Artificial Sequence
  Description of Artificial Sequence: Synthetic oligonucleotide
aauacugucccuuuuaagcuu

SEQ ID NO: 17 - RNA, 21 nt, Artificial Sequence
  Description of Artificial Sequence: Synthetic oligonucleotide
aauacugucccuuuuaagcuu

SEQ ID NO: 18 - RNA, 21 nt, Artificial Sequence
  Description of Artificial Sequence: Synthetic oligonucleotide
aauacugucccuuuuaagcuu

SEQ ID NO: 19 - RNA, 21 nt, Artificial Sequence
  Description of Artificial Sequence: Synthetic oligonucleotide
aauacugucccuuuuaagcuu

SEQ ID NO: 20 - RNA, 21 nt, Artificial Sequence
  Description of Artificial Sequence: Synthetic oligonucleotide
aauacugucccuuuuaagcuu

SEQ ID NO: 21 - RNA, 21 nt, Artificial Sequence
  Description of Artificial Sequence: Synthetic oligonucleotide
aauacugucccuuuuaagcuu

SEQ ID NO: 22 - RNA, 21 nt, Artificial Sequence
  Description of Artificial Sequence: Synthetic oligonucleotide
aauacugucccuuuuaagcuu

SEQ ID NO: 23 - RNA, 21 nt, Artificial Sequence
  Description of Artificial Sequence: Synthetic oligonucleotide
aauacugucccuuuuaagcuu

SEQ ID NO: 24 - RNA, 21 nt, Artificial Sequence
  Description of Artificial Sequence: Synthetic oligonucleotide
aauacugucccuuuuaagcuu

SEQ ID NO: 25 - RNA, 21 nt, Artificial Sequence
  Description of Artificial Sequence: Synthetic oligonucleotide
aauacugucccuuuuaagcuu

SEQ ID NO: 26 - RNA, 21 nt, Artificial Sequence
  Description of Artificial Sequence: Synthetic oligonucleotide
gcuuaaaagggacaguauuuu

SEQ ID NO: 27 - RNA, 21 nt, Artificial Sequence
  Description of Artificial Sequence: Synthetic oligonucleotide
gugcauccuuggcggucuuuu

SEQ ID NO: 28 - RNA, 21 nt, Artificial Sequence
  Description of Artificial Sequence: Synthetic oligonucleotide
gugcauccuuggcggucuuuu

SEQ ID NO: 29 - RNA, 21 nt, Artificial Sequence
  Description of Artificial Sequence: Synthetic oligonucleotide
gugcauccuuggcggucuuuu

SEQ ID NO: 30 - RNA, 21 nt, Artificial Sequence
  Description of Artificial Sequence: Synthetic oligonucleotide
gugcauccuuggcggucuuuu

SEQ ID NO: 31 - RNA, 21 nt, Artificial Sequence
  Description of Artificial Sequence: Synthetic oligonucleotide
gucccagguggcccagcaguu

SEQ ID NO: 32 - RNA, 21 nt, Artificial Sequence
  Description of Artificial Sequence: Synthetic oligonucleotide
cugcugggccaccugggacuu

SEQ ID NO: 33 - RNA, 21 nt, Artificial Sequence
  Description of Artificial Sequence: Synthetic oligonucleotide
cugcugggccaccugggacuu

SEQ ID NO: 34 - RNA, 21 nt, Artificial Sequence
  Description of Artificial Sequence: Synthetic oligonucleotide
cugcugggccaccugggacuu

SEQ ID NO: 35 - RNA, 21 nt, Artificial Sequence
  Description of Artificial Sequence: Synthetic oligonucleotide
cugcugggccaccugggacuu

SEQ ID NO: 36 - RNA, 21 nt, Artificial Sequence
  Description of Artificial Sequence: Synthetic oligonucleotide
gacccugaggucagaccaauu

SEQ ID NO: 37 - RNA, 21 nt, Artificial Sequence
  Description of Artificial Sequence: Synthetic oligonucleotide
uuggucugaccucagggucuu

SEQ ID NO: 38 - RNA, 21 nt, Artificial Sequence
  Description of Artificial Sequence: Synthetic oligonucleotide
uuggucugaccucagggucuu

SEQ ID NO: 39 - RNA, 21 nt, Artificial Sequence
  Description of Artificial Sequence: Synthetic oligonucleotide
uuggucugaccucagggucuu

SEQ ID NO: 40 - RNA, 21 nt, Artificial Sequence
  Description of Artificial Sequence: Synthetic oligonucleotide
uuggucugaccucagggucuu

SEQ ID NO: 41 - RNA, 21 nt, Artificial Sequence
  Description of Artificial Sequence: Synthetic oligonucleotide
uuggucugaccucagggucuu

SEQ ID NO: 42 - RNA, 21 nt, Artificial Sequence
  Description of Artificial Sequence: Synthetic oligonucleotide
uuggucugaccucagggucuu

SEQ ID NO: 43 - RNA, 21 nt, Artificial Sequence
  Description of Artificial Sequence: Synthetic oligonucleotide
ccuccaggcaugcuggccuuu

SEQ ID NO: 44 - RNA, 21 nt, Artificial Sequence
  Description of Artificial Sequence: Synthetic oligonucleotide
aggccagcaugccuggagguu

SEQ ID NO: 45 - RNA, 21 nt, Artificial Sequence
  Description of Artificial Sequence: Synthetic oligonucleotide
aggccagcaugccuggagguu

SEQ ID NO: 46 - RNA, 21 nt, Artificial Sequence
  Description of Artificial Sequence: Synthetic oligonucleotide
aggccagcaugccuggagguu

SEQ ID NO: 47 - RNA, 21 nt, Artificial Sequence
  Description of Artificial Sequence: Synthetic oligonucleotide
aggccagcaugccuggagguu

SEQ ID NO: 48 - RNA, 21 nt, Artificial Sequence
  Description of Artificial Sequence: Synthetic oligonucleotide
gugcaggagucccaggugguu

SEQ ID NO: 49 - RNA, 21 nt, Artificial Sequence
  Description of Artificial Sequence: Synthetic oligonucleotide
ccaccugggacuccugcacuu

SEQ ID NO: 50 - RNA, 21 nt, Artificial Sequence
  Description of Artificial Sequence: Synthetic oligonucleotide
ccaccugggacuccugcacuu

SEQ ID NO: 51 - RNA, 21 nt, Artificial Sequence
  Description of Artificial Sequence: Synthetic oligonucleotide
ccaccugggacuccugcacuu

SEQ ID NO: 52 - RNA, 21 nt, Artificial Sequence
  Description of Artificial Sequence: Synthetic oligonucleotide
ccaccugggacuccugcacuu

SEQ ID NO: 53 - RNA, 21 nt, Artificial Sequence
  Description of Artificial Sequence: Synthetic oligonucleotide
gggcugggugaccgauggcuu

SEQ ID NO: 54 - RNA, 21 nt, Artificial Sequence
  Description of Artificial Sequence: Synthetic oligonucleotide
gccaucggucacccagcccuu

SEQ ID NO: 55 - RNA, 21 nt, Artificial Sequence
  Description of Artificial Sequence: Synthetic oligonucleotide
gccaucggucacccagcccuu

SEQ ID NO: 56 - RNA, 21 nt, Artificial Sequence
  Description of Artificial Sequence: Synthetic oligonucleotide
gccaucggucacccagcccuu

SEQ ID NO: 57 - RNA, 21 nt, Artificial Sequence
  Description of Artificial Sequence: Synthetic oligonucleotide
gccaucggucacccagcccuu

SEQ ID NO: 58 - RNA, 21 nt, Artificial Sequence
  Description of Artificial Sequence: Synthetic oligonucleotide
gccucccaauaaagcuggauu

SEQ ID NO: 59 - RNA, 21 nt, Artificial Sequence
  Description of Artificial Sequence: Synthetic oligonucleotide
uccagcuuuauugggaggcuu

SEQ ID NO: 60 - RNA, 21 nt, Artificial Sequence
  Description of Artificial Sequence: Synthetic oligonucleotide
uccagcuuuauugggaggcuu

SEQ ID NO: 61 - RNA, 21 nt, Artificial Sequence
  Description of Artificial Sequence: Synthetic oligonucleotide
uccagcuuuauugggaggcuu

SEQ ID NO: 62 - RNA, 21 nt, Artificial Sequence
  Description of Artificial Sequence: Synthetic oligonucleotide
uccagcuuuauugggaggcuu

SEQ ID NO: 63 - RNA, 21 nt, Artificial Sequence
  Description of Artificial Sequence: Synthetic oligonucleotide
ccguggcugccugagaccuuu

SEQ ID NO: 64 - RNA, 21 nt, Artificial Sequence
  Description of Artificial Sequence: Synthetic oligonucleotide
aggucucaggcagccacgguu

SEQ ID NO: 65 - RNA, 21 nt, Artificial Sequence
  Description of Artificial Sequence: Synthetic oligonucleotide
aggucucaggcagccacgguu

SEQ ID NO: 66 - RNA, 21 nt, Artificial Sequence
  Description of Artificial Sequence: Synthetic oligonucleotide
aggucucaggcagccacgguu

SEQ ID NO: 67 - RNA, 21 nt, Artificial Sequence
  Description of Artificial Sequence: Synthetic oligonucleotide
aggucucaggcagccacgguu

SEQ ID NO: 68 - RNA, 21 nt, Artificial Sequence
  Description of Artificial Sequence: Synthetic oligonucleotide
gcuuaaaagggacaguauuuu

SEQ ID NO: 69 - RNA, 21 nt, Artificial Sequence
  Description of Artificial Sequence: Synthetic oligonucleotide
aauacugucccuuuuaagcuu

SEQ ID NO: 70 - RNA, 21 nt, Artificial Sequence
  Description of Artificial Sequence: Synthetic oligonucleotide
aauacugucccuuuuaagcuu

SEQ ID NO: 71 - RNA, 21 nt, Artificial Sequence
  Description of Artificial Sequence: Synthetic oligonucleotide
aauacugucccuuuuaagcuu

SEQ ID NO: 72 - RNA, 21 nt, Artificial Sequence
  Description of Artificial Sequence: Synthetic oligonucleotide
aauacugucccuuuuaagcuu

SEQ ID NO: 73 - RNA, 21 nt, Artificial Sequence
  Description of Artificial Sequence: Synthetic oligonucleotide
aauacugucccuuuuaagcuu

SEQ ID NO: 74 - RNA, 21 nt, Artificial Sequence
  Description of Artificial Sequence: Synthetic oligonucleotide
aauacugucccuuuuaagcuu

SEQ ID NO: 75 - DNA, 21 bp, Artificial Sequence
  Description of Artificial Sequence: Synthetic oligonucleotide
  Description of Combined DNA/RNA Molecule: Synthetic oligonucleotide
gggacagtattctcagtgauu

SEQ ID NO: 76 - RNA, 21 nt, Artificial Sequence
  Description of Artificial Sequence: Synthetic oligonucleotide
ucacugagaauacugucccuu

SEQ ID NO: 77 - RNA, 21 nt, Artificial Sequence
  Description of Artificial Sequence: Synthetic oligonucleotide
ucacugagaauacugucccuu

SEQ ID NO: 78 - RNA, 21 nt, Artificial Sequence
  Description of Artificial Sequence: Synthetic oligonucleotide
ucacugagaauacugucccuu

SEQ ID NO: 79 - RNA, 21 nt, Artificial Sequence
  Description of Artificial Sequence: Synthetic oligonucleotide
ucacugagaauacugucccuu

SEQ ID NO: 80 - RNA, 21 nt, Artificial Sequence
  Description of Artificial Sequence: Synthetic oligonucleotide
ucacugagaauacugucccuu

SEQ ID NO: 81 - RNA, 21 nt, Artificial Sequence
  Description of Artificial Sequence: Synthetic oligonucleotide
ucacugagaauacugucccuu

SEQ ID NO: 82 - RNA, 21 nt, Artificial Sequence
  Description of Artificial Sequence: Synthetic oligonucleotide
ucacugagaauacugucccuu

SEQ ID NO: 83 - RNA, 21 nt, Artificial Sequence
  Description of Artificial Sequence: Synthetic oligonucleotide
ucacugagaauacugucccuu

SEQ ID NO: 84 - RNA, 21 nt, Artificial Sequence
  Description of Artificial Sequence: Synthetic oligonucleotide
ucacugagaauacugucccuu

SEQ ID NO: 85 - RNA, 21 nt, Artificial Sequence
  Description of Artificial Sequence: Synthetic oligonucleotide
ucacugagaauacugucccuu

SEQ ID NO: 86 - RNA, 21 nt, Artificial Sequence
  Description of Artificial Sequence: Synthetic oligonucleotide
ucacugagaauacugucccuu

SEQ ID NO: 87 - RNA, 21 nt, Artificial Sequence
  Description of Artificial Sequence: Synthetic oligonucleotide
aaagcuggacaagaagcuauu

SEQ ID NO: 88 - RNA, 21 nt, Artificial Sequence
  Description of Artificial Sequence: Synthetic oligonucleotide
uagcuucuuguccagcuuuuu

SEQ ID NO: 89 - RNA, 21 nt, Artificial Sequence
  Description of Artificial Sequence: Synthetic oligonucleotide
uagcuucuuguccagcuuuuu

SEQ ID NO: 90 - RNA, 21 nt, Artificial Sequence
  Description of Artificial Sequence: Synthetic oligonucleotide
uagcuucuuguccagcuuuuu

SEQ ID NO: 91 - RNA, 21 nt, Artificial Sequence
  Description of Artificial Sequence: Synthetic oligonucleotide
uagcuucuuguccagcuuuuu

SEQ ID NO: 92 - RNA, 21 nt, Artificial Sequence
  Description of Artificial Sequence: Synthetic oligonucleotide
uagcuucuuguccagcuuuuu

SEQ ID NO: 93 - RNA, 21 nt, Artificial Sequence
  Description of Artificial Sequence: Synthetic oligonucleotide
uagcuucuuguccagcuuuuu

SEQ ID NO: 94 - RNA, 21 nt, Artificial Sequence
  Description of Artificial Sequence: Synthetic oligonucleotide
uagcuucuuguccagcuuuuu

SEQ ID NO: 95 - RNA, 21 nt, Artificial Sequence
  Description of Artificial Sequence: Synthetic oligonucleotide
uagcuucuuguccagcuuuuu

SEQ ID NO: 96 - RNA, 21 nt, Artificial Sequence
  Description of Artificial Sequence: Synthetic oligonucleotide
uagcuucuuguccagcuuuuu

SEQ ID NO: 97 - RNA, 21 nt, Artificial Sequence
  Description of Artificial Sequence: Synthetic oligonucleotide
uagcuucuuguccagcuuuuu

SEQ ID NO: 98 - RNA, 21 nt, Artificial Sequence
  Description of Artificial Sequence: Synthetic oligonucleotide
uagcuucuuguccagcuuuuu

SEQ ID NO: 99 - RNA, 21 nt, Artificial Sequence
  Description of Artificial Sequence: Synthetic oligonucleotide
gcuucagaggccgaggauguu

SEQ ID NO: 100 - RNA, 21 nt, Artificial Sequence
  Description of Artificial Sequence: Synthetic oligonucleotide
cauccucggccucugaagcuu

SEQ ID NO: 101 - RNA, 21 nt, Artificial Sequence
  Description of Artificial Sequence: Synthetic oligonucleotide
cauccucggccucugaagcuu

SEQ ID NO: 102 - RNA, 21 nt, Artificial Sequence
  Description of Artificial Sequence: Synthetic oligonucleotide
cauccucggccucugaagcuu

SEQ ID NO: 103 - RNA, 21 nt, Artificial Sequence
  Description of Artificial Sequence: Synthetic oligonucleotide
cauccucggccucugaagcuu

SEQ ID NO: 104 - RNA, 21 nt, Artificial Sequence
  Description of Artificial Sequence: Synthetic oligonucleotide
augaagcacgccaccaagauu

SEQ ID NO: 105 - RNA, 21 nt, Artificial Sequence
  Description of Artificial Sequence: Synthetic oligonucleotide
ucuugguggcgugcuucauuu

SEQ ID NO: 106 - RNA, 21 nt, Artificial Sequence
  Description of Artificial Sequence: Synthetic oligonucleotide
ucuugguggcgugcuucauuu

SEQ ID NO: 107 - RNA, 21 nt, Artificial Sequence
  Description of Artificial Sequence: Synthetic oligonucleotide
ucuugguggcgugcuucauuu

SEQ ID NO: 108 - RNA, 21 nt, Artificial Sequence
  Description of Artificial Sequence: Synthetic oligonucleotide
ucuugguggcgugcuucauuu

SEQ ID NO: 109 - RNA, 21 nt, Artificial Sequence
  Description of Artificial Sequence: Synthetic oligonucleotide
ugaggucagaccaacuucauu

SEQ ID NO: 110 - RNA, 21 nt, Artificial Sequence
  Description of Artificial Sequence: Synthetic oligonucleotide
ugaaguuggucugaccucauu

SEQ ID NO: 111 - RNA, 21 nt, Artificial Sequence
  Description of Artificial Sequence: Synthetic oligonucleotide
ugaaguuggucugaccucauu

SEQ ID NO: 112 - RNA, 21 nt, Artificial Sequence
  Description of Artificial Sequence: Synthetic oligonucleotide
ugaaguuggucugaccucauu

SEQ ID NO: 113 - RNA, 21 nt, Artificial Sequence
  Description of Artificial Sequence: Synthetic oligonucleotide
ugaaguuggucugaccucauu

SEQ ID NO: 114 - RNA, 21 nt, Artificial Sequence
  Description of Artificial Sequence: Synthetic oligonucleotide
ugaaguuggucugaccucauu

SEQ ID NO: 115 - RNA, 21 nt, Artificial Sequence
  Description of Artificial Sequence: Synthetic oligonucleotide
ugaaguuggucugaccucauu

SEQ ID NO: 116 - RNA, 21 nt, Artificial Sequence
  Description of Artificial Sequence: Synthetic oligonucleotide
aggguuacaugaagcacgcuu

SEQ ID NO: 117 - RNA, 21 nt, Artificial Sequence
  Description of Artificial Sequence: Synthetic oligonucleotide
gcgugcuucauguaacccuuu

SEQ ID NO: 118 - RNA, 21 nt, Artificial Sequence
  Description of Artificial Sequence: Synthetic oligonucleotide
gcgugcuucauguaacccuuu

SEQ ID NO: 119 - RNA, 21 nt, Artificial Sequence
  Description of Artificial Sequence: Synthetic oligonucleotide
gcgugcuucauguaacccuuu

SEQ ID NO: 120 - RNA, 21 nt, Artificial Sequence
  Description of Artificial Sequence: Synthetic oligonucleotide
gcgugcuucauguaacccuuu

SEQ ID NO: 121 - RNA, 21 nt, Artificial Sequence
  Description of Artificial Sequence: Synthetic oligonucleotide
aauacugucccuuuuaagcuu

SEQ ID NO: 122 - RNA, 21 nt, Artificial Sequence
  Description of Artificial Sequence: Synthetic oligonucleotide
aauacugucccuuuuaagcuu

SEQ ID NO: 123 - RNA, 21 nt, Artificial Sequence
  Description of Artificial Sequence: Synthetic oligonucleotide
aauacugucccuuuuaagcuu

SEQ ID NO: 124 - RNA, 21 nt, Artificial Sequence
  Description of Artificial Sequence: Synthetic oligonucleotide
aauacugucccuuuuaagcuu

SEQ ID NO: 125 - RNA, 21 nt, Artificial Sequence
  Description of Artificial Sequence: Synthetic oligonucleotide
aauacugucccuuuuaagcuu

SEQ ID NO: 126 - RNA, 21 nt, Artificial Sequence
  Description of Artificial Sequence: Synthetic oligonucleotide
aauacugucccuuuuaagcuu

SEQ ID NO: 127 - RNA, 21 nt, Artificial Sequence
  Description of Artificial Sequence: Synthetic oligonucleotide
aauacugucccuuuuaagcuu

SEQ ID NO: 128 - RNA, 21 nt, Artificial Sequence
  Description of Artificial Sequence: Synthetic oligonucleotide
aauacugucccuuuuaagcuu

SEQ ID NO: 129 - RNA, 21 nt, Artificial Sequence
  Description of Artificial Sequence: Synthetic oligonucleotide
aauacugucccuuuuaagcuu

SEQ ID NO: 130 - RNA, 21 nt, Artificial Sequence
  Description of Artificial Sequence: Synthetic oligonucleotide
aauacugucccuuuuaagcuu

SEQ ID NO: 131 - RNA, 21 nt, Artificial Sequence
  Description of Artificial Sequence: Synthetic oligonucleotide
aauacugucccuuuuaagcuu

SEQ ID NO: 132 - RNA, 21 nt, Artificial Sequence
  Description of Artificial Sequence: Synthetic oligonucleotide
aauacugucccuuuuaagcuu

SEQ ID NO: 133 - RNA, 21 nt, Artificial Sequence
  Description of Artificial Sequence: Synthetic oligonucleotide
aauacugucccuuuuaagcuu

SEQ ID NO: 134 - RNA, 21 nt, Artificial Sequence
  Description of Artificial Sequence: Synthetic oligonucleotide
aauacugucccuuuuaagcuu

SEQ ID NO: 135 - RNA, 21 nt, Artificial Sequence
  Description of Artificial Sequence: Synthetic oligonucleotide
aauacugucccuuuuaagcuu

SEQ ID NO: 136 - RNA, 21 nt, Artificial Sequence
  Description of Artificial Sequence: Synthetic oligonucleotide
aauacugucccuuuuaagcuu

SEQ ID NO: 137 - RNA, 21 nt, Artificial Sequence
  Description of Artificial Sequence: Synthetic oligonucleotide
aauacugucccuuuuaagcuu

SEQ ID NO: 138 - RNA, 21 nt, Artificial Sequence
  Description of Artificial Sequence: Synthetic oligonucleotide
aauacugucccuuuuaagcuu

SEQ ID NO: 139 - RNA, 21 nt, Artificial Sequence
  Description of Artificial Sequence: Synthetic oligonucleotide
aauacugucccuuuuaagcuu

SEQ ID NO: 140 - RNA, 21 nt, Artificial Sequence
  Description of Artificial Sequence: Synthetic oligonucleotide
aauacugucccuuuuaagcuu

SEQ ID NO: 141 - RNA, 21 nt, Artificial Sequence
  Description of Artificial Sequence: Synthetic oligonucleotide
aauacugucccuuuuaagcuu

SEQ ID NO: 142 - RNA, 21 nt, Artificial Sequence
  Description of Artificial Sequence: Synthetic oligonucleotide
aauacugucccuuuuaagcuu

SEQ ID NO: 143 - RNA, 21 nt, Artificial Sequence
  Description of Artificial Sequence: Synthetic oligonucleotide
aauacugucccuuuuaagcuu

SEQ ID NO: 144 - RNA, 21 nt, Artificial Sequence
  Description of Artificial Sequence: Synthetic oligonucleotide
aauacugucccuuuuaagcuu

SEQ ID NO: 145 - RNA, 21 nt, Artificial Sequence
  Description of Artificial Sequence: Synthetic oligonucleotide
aauacugucccuuuuaagcuu

SEQ ID NO: 146 - RNA, 21 nt, Artificial Sequence
  Description of Artificial Sequence: Synthetic oligonucleotide
aauacugucccuuuuaagcuu

SEQ ID NO: 147 - RNA, 21 nt, Artificial Sequence
  Description of Artificial Sequence: Synthetic oligonucleotide
aauacugucccuuuuaagcuu

SEQ ID NO: 148 - RNA, 21 nt, Artificial Sequence
  Description of Artificial Sequence: Synthetic oligonucleotide
aauacugucccuuuuaagcuu

SEQ ID NO: 149 - RNA, 21 nt, Artificial Sequence
  Description of Artificial Sequence: Synthetic oligonucleotide
aauacugucccuuuuaagcuu

SEQ ID NO: 150 - RNA, 21 nt, Artificial Sequence
  Description of Artificial Sequence: Synthetic oligonucleotide
aauacugucccuuuuaagcuu

SEQ ID NO: 151 - RNA, 21 nt, Artificial Sequence
  Description of Artificial Sequence: Synthetic oligonucleotide
aauacugucccuuuuaagcuu

SEQ ID NO: 152 - RNA, 21 nt, Artificial Sequence
  Description of Artificial Sequence: Synthetic oligonucleotide
aauacugucccuuuuaagcuu

SEQ ID NO: 153 - RNA, 21 nt, Artificial Sequence
  Description of Artificial Sequence: Synthetic oligonucleotide
aauacugucccuuuuaagcuu

SEQ ID NO: 154 - RNA, 21 nt, Artificial Sequence
  Description of Artificial Sequence: Synthetic oligonucleotide
aauacugucccuuuuaagcuu

SEQ ID NO: 155 - RNA, 21 nt, Artificial Sequence
  Description of Artificial Sequence: Synthetic oligonucleotide
aauacugucccuuuuaagcuu

SEQ ID NO: 156 - RNA, 21 nt, Artificial Sequence
  Description of Artificial Sequence: Synthetic oligonucleotide
aauacugucccuuuuaagcuu

SEQ ID NO: 157 - RNA, 21 nt, Artificial Sequence
  Description of Artificial Sequence: Synthetic oligonucleotide
aauacugucccuuuuaagcuu

SEQ ID NO: 158 - RNA, 21 nt, Artificial Sequence
  Description of Artificial Sequence: Synthetic oligonucleotide
aauacugucccuuuuaagcuu

SEQ ID NO: 159 - RNA, 21 nt, Artificial Sequence
  Description of Artificial Sequence: Synthetic oligonucleotide
aauacugucccuuuuaagcuu

SEQ ID NO: 160 - RNA, 21 nt, Artificial Sequence
  Description of Artificial Sequence: Synthetic oligonucleotide
aauacugucccuuuuaagcuu

SEQ ID NO: 161 - RNA, 21 nt, Artificial Sequence
  Description of Artificial Sequence: Synthetic oligonucleotide
uccagcuuuauugggaggcuu

SEQ ID NO: 162 - RNA, 21 nt, Artificial Sequence
  Description of Artificial Sequence: Synthetic oligonucleotide
aggucucaggcagccacgguu

SEQ ID NO: 163 - RNA, 21 nt, Artificial Sequence
  Description of Artificial Sequence: Synthetic oligonucleotide
aggccagcaugccuggagguu

SEQ ID NO: 164 - RNA, 21 nt, Artificial Sequence
  Description of Artificial Sequence: Synthetic oligonucleotide
ccaccugggacuccugcacuu

SEQ ID NO: 165 - RNA, 21 nt, Artificial Sequence
  Description of Artificial Sequence: Synthetic oligonucleotide
gccaucggucacccagcccuu

SEQ ID NO: 166 - RNA, 21 nt, Artificial Sequence
  Description of Artificial Sequence: Synthetic oligonucleotide
gugcauccuuggcggucuuuu

SEQ ID NO: 167 - RNA, 21 nt, Artificial Sequence
  Description of Artificial Sequence: Synthetic oligonucleotide
cugcugggccaccugggacuu

SEQ ID NO: 168 - RNA, 21 nt, Artificial Sequence
  Description of Artificial Sequence: Synthetic oligonucleotide
cauccucggccucugaagcuu

SEQ ID NO: 169 - RNA, 21 nt, Artificial Sequence
  Description of Artificial Sequence: Synthetic oligonucleotide
ucuugguggcgugcuucauuu

SEQ ID NO: 170 - RNA, 21 nt, Artificial Sequence
  Description of Artificial Sequence: Synthetic oligonucleotide
gcgugcuucauguaacccuuu

SEQ ID NO: 171 - RNA, 21 nt, Artificial Sequence
  Description of Artificial Sequence: Synthetic oligonucleotide
aauacugucccuuuuaagcuu

SEQ ID NO: 172 - RNA, 19 nt, Artificial Sequence
  Description of Artificial Sequence: Synthetic oligonucleotide
gcuuaaaagggacaguauu

SEQ ID NO: 173 - RNA, 25 nt, Artificial Sequence
  Description of Artificial Sequence: Synthetic oligonucleotide
guugcuuaaaagggacaguauucuc

SEQ ID NO: 174 - DNA, 21 bp, Artificial Sequence
  Description of Artificial Sequence: Synthetic oligonucleotide
tcactgagaatactgtcccaa

SEQ ID NO: 175 - RNA, 21 nt, Artificial Sequence
  Description of Artificial Sequence: Synthetic oligonucleotide
ucacugagaauacugucccaa

SEQ ID NO: 176 - RNA, 21 nt, Artificial Sequence
  Description of Artificial Sequence: Synthetic oligonucleotide
uagcuucuuguccagcuuuuu

SEQ ID NO: 177 - RNA, 21 nt, Artificial Sequence
  Description of Artificial Sequence: Synthetic oligonucleotide
uagcuucuuguccagcuuuuu

SEQ ID NO: 178 - RNA, 21 nt, Artificial Sequence
  Description of Artificial Sequence: Synthetic oligonucleotide
uagcuucuuguccagcuuuuu

SEQ ID NO: 179 - RNA, 21 nt, Artificial Sequence
  Description of Artificial Sequence: Synthetic oligonucleotide
uagcuucuuguccagcuuuuu

SEQ ID NO: 180 - RNA, 21 nt, Artificial Sequence
  Description of Artificial Sequence: Synthetic oligonucleotide
uagcuucuuguccagcuuuuu

SEQ ID NO: 181 - RNA, 21 nt, Artificial Sequence
  Description of Artificial Sequence: Synthetic oligonucleotide
uagcuucuuguccagcuuuuu

SEQ ID NO: 182 - RNA, 21 nt, Artificial Sequence
  Description of Artificial Sequence: Synthetic oligonucleotide
ucacugagaauacugucccuu

SEQ ID NO: 183 - RNA, 21 nt, Artificial Sequence
  Description of Artificial Sequence: Synthetic oligonucleotide
ucacugagaauacugucccuu

SEQ ID NO: 184 - RNA, 21 nt, Artificial Sequence
  Description of Artificial Sequence: Synthetic oligonucleotide
gugcauccuuggcggucuuuu

SEQ ID NO: 185 - RNA, 21 nt, Artificial Sequence
  Description of Artificial Sequence: Synthetic oligonucleotide
gugcauccuuggcggucuuuu

SEQ ID NO: 186 - RNA, 21 nt, Artificial Sequence
  Description of Artificial Sequence: Synthetic oligonucleotide
gugcauccuuggcggucuuuu

SEQ ID NO: 187 - RNA, 21 nt, Artificial Sequence
  Description of Artificial Sequence: Synthetic oligonucleotide
gugcauccuuggcggucuuuu

SEQ ID NO: 188 - RNA, 21 nt, Artificial Sequence
  Description of Artificial Sequence: Synthetic oligonucleotide
cugcugggccaccugggacuu

SEQ ID NO: 189 - RNA, 21 nt, Artificial Sequence
  Description of Artificial Sequence: Synthetic oligonucleotide
cugcugggccaccugggacuu

SEQ ID NO: 190 - RNA, 21 nt, Artificial Sequence
  Description of Artificial Sequence: Synthetic oligonucleotide
cugcugggccaccugggacuu

SEQ ID NO: 191 - RNA, 21 nt, Artificial Sequence
  Description of Artificial Sequence: Synthetic oligonucleotide
cugcugggccaccugggacuu

SEQ ID NO: 192 - RNA, 21 nt, Artificial Sequence
  Description of Artificial Sequence: Synthetic oligonucleotide
uuggucugaccucagggucuu

SEQ ID NO: 193 - RNA, 21 nt, Artificial Sequence
  Description of Artificial Sequence: Synthetic oligonucleotide
uuggucugaccucagggucuu

SEQ ID NO: 194 - RNA, 21 nt, Artificial Sequence
  Description of Artificial Sequence: Synthetic oligonucleotide
uuggucugaccucagggucuu

SEQ ID NO: 195 - RNA, 21 nt, Artificial Sequence
  Description of Artificial Sequence: Synthetic oligonucleotide
uuggucugaccucagggucuu

SEQ ID NO: 196 - RNA, 21 nt, Artificial Sequence
  Description of Artificial Sequence: Synthetic oligonucleotide
aggccagcaugccuggagguu

SEQ ID NO: 197 - RNA, 21 nt, Artificial Sequence
  Description of Artificial Sequence: Synthetic oligonucleotide
aggccagcaugccuggagguu

SEQ ID NO: 198 - RNA, 21 nt, Artificial Sequence
  Description of Artificial Sequence: Synthetic oligonucleotide
aggccagcaugccuggagguu

SEQ ID NO: 199 - RNA, 21 nt, Artificial Sequence
  Description of Artificial Sequence: Synthetic oligonucleotide
aggccagcaugccuggagguu

SEQ ID NO: 200 - RNA, 21 nt, Artificial Sequence
  Description of Artificial Sequence: Synthetic oligonucleotide
ccaccugggacuccugcacuu

SEQ ID NO: 201 - RNA, 21 nt, Artificial Sequence
  Description of Artificial Sequence: Synthetic oligonucleotide
ccaccugggacuccugcacuu

SEQ ID NO: 202 - RNA, 21 nt, Artificial Sequence
  Description of Artificial Sequence: Synthetic oligonucleotide
ccaccugggacuccugcacuu

SEQ ID NO: 203 - RNA, 21 nt, Artificial Sequence
  Description of Artificial Sequence: Synthetic oligonucleotide
ccaccugggacuccugcacuu

SEQ ID NO: 204 - RNA, 21 nt, Artificial Sequence
  Description of Artificial Sequence: Synthetic oligonucleotide
gccaucggucacccagcccuu

SEQ ID NO: 205 - RNA, 21 nt, Artificial Sequence
  Description of Artificial Sequence: Synthetic oligonucleotide
gccaucggucacccagcccuu

SEQ ID NO: 206 - RNA, 21 nt, Artificial Sequence
  Description of Artificial Sequence: Synthetic oligonucleotide
gccaucggucacccagcccuu

SEQ ID NO: 207 - RNA, 21 nt, Artificial Sequence
  Description of Artificial Sequence: Synthetic oligonucleotide
gccaucggucacccagcccuu

SEQ ID NO: 208 - RNA, 21 nt, Artificial Sequence
  Description of Artificial Sequence: Synthetic oligonucleotide
uccagcuuuauugggaggcuu

SEQ ID NO: 209 - RNA, 21 nt, Artificial Sequence
  Description of Artificial Sequence: Synthetic oligonucleotide
uccagcuuuauugggaggcuu

SEQ ID NO: 210 - RNA, 21 nt, Artificial Sequence
  Description of Artificial Sequence: Synthetic oligonucleotide
uccagcuuuauugggaggcuu

SEQ ID NO: 211 - RNA, 21 nt, Artificial Sequence
  Description of Artificial Sequence: Synthetic oligonucleotide
uccagcuuuauugggaggcuu

SEQ ID NO: 212 - RNA, 21 nt, Artificial Sequence
  Description of Artificial Sequence: Synthetic oligonucleotide
aggucucaggcagccacgguu

SEQ ID NO: 213 - RNA, 21 nt, Artificial Sequence
  Description of Artificial Sequence: Synthetic oligonucleotide
aggucucaggcagccacgguu

SEQ ID NO: 214 - RNA, 21 nt, Artificial Sequence
  Description of Artificial Sequence: Synthetic oligonucleotide
aggucucaggcagccacgguu

SEQ ID NO: 215 - RNA, 21 nt, Artificial Sequence
  Description of Artificial Sequence: Synthetic oligonucleotide
aggucucaggcagccacgguu

SEQ ID NO: 216 - RNA, 21 nt, Artificial Sequence
  Description of Artificial Sequence: Synthetic oligonucleotide
uguccagcuuuauugggaguu

SEQ ID NO: 217 - RNA, 25 nt, Artificial Sequence
  Description of Artificial Sequence: Synthetic oligonucleotide
uguccagcuuuauugggaggccauu

SEQ ID NO: 218 - DNA, 25 bp, Artificial Sequence
  Description of Artificial Sequence: Synthetic oligonucleotide
  Description of Combined DNA/RNA Molecule: Synthetic oligonucleotide
uagcuucuuguccagctttattguu

SEQ ID NO: 219 - DNA, 21 bp, Artificial Sequence
  Description of Artificial Sequence: Synthetic oligonucleotide
  Description of Combined DNA/RNA Molecule: Synthetic oligonucleotide
uagcuucuuguccagcuuutu

SEQ ID NO: 220 - DNA, 21 bp, Artificial Sequence
  Description of Artificial Sequence: Synthetic oligonucleotide
  Description of Combined DNA/RNA Molecule: Synthetic oligonucleotide
uagcuucuuguccagcuutuu

SEQ ID NO: 221 - DNA, 25 bp, Artificial Sequence
  Description of Artificial Sequence: Synthetic oligonucleotide
  Description of Combined DNA/RNA Molecule: Synthetic oligonucleotide
uagcuucuuguccagctttattgtu

SEQ ID NO: 222 - DNA, 25 bp, Artificial Sequence
  Description of Artificial Sequence: Synthetic oligonucleotide
  Description of Combined DNA/RNA Molecule: Synthetic oligonucleotide
uagcuucuuguccagctttatttuu

SEQ ID NO: 223 - DNA, 21 bp, Artificial Sequence
  Description of Artificial Sequence: Synthetic oligonucleotide
  Description of Combined DNA/RNA Molecule: Synthetic oligonucleotide
uguccagcuuuauugggagtu

SEQ ID NO: 224 - DNA, 21 bp, Artificial Sequence
  Description of Artificial Sequence: Synthetic oligonucleotide
  Description of Combined DNA/RNA Molecule: Synthetic oligonucleotide
uguccagcuuuauugggatuu

SEQ ID NO: 225 - DNA, 25 bp, Artificial Sequence
  Description of Artificial Sequence: Synthetic oligonucleotide
  Description of Combined DNA/RNA Molecule: Synthetic oligonucleotide
uguccagcuuuauugggaggccatu

SEQ ID NO: 226 - DNA, 25 bp, Artificial Sequence
  Description of Artificial Sequence: Synthetic oligonucleotide
  Description of Combined DNA/RNA Molecule: Synthetic oligonucleotide
uguccagcuuuauugggaggcctuu

SEQ ID NO: 227 - RNA, 21 nt, Artificial Sequence
  Description of Artificial Sequence: Synthetic oligonucleotide
cauagcagcuucuuguccauu

SEQ ID NO: 228 - RNA, 21 nt, Artificial Sequence
  Description of Artificial Sequence: Synthetic oligonucleotide
auagcagcuucuuguccaguu

SEQ ID NO: 229 - RNA, 21 nt, Artificial Sequence
  Description of Artificial Sequence: Synthetic oligonucleotide
uagcagcuucuuguccagcuu

SEQ ID NO: 230 - RNA, 21 nt, Artificial Sequence
  Description of Artificial Sequence: Synthetic oligonucleotide
agcagcuucuuguccagcuuu

SEQ ID NO: 231 - RNA, 21 nt, Artificial Sequence
  Description of Artificial Sequence: Synthetic oligonucleotide
gcagcuucuuguccagcuuuu

SEQ ID NO: 232 - RNA, 21 nt, Artificial Sequence
  Description of Artificial Sequence: Synthetic oligonucleotide
cagcuucuuguccagcuuuuu

SEQ ID NO: 233 - RNA, 21 nt, Artificial Sequence
  Description of Artificial Sequence: Synthetic oligonucleotide
agcuucuuguccagcuuuauu

SEQ ID NO: 234 - RNA, 21 nt, Artificial Sequence
  Description of Artificial Sequence: Synthetic oligonucleotide
gcuucuuguccagcuuuauuu

SEQ ID NO: 235 - RNA, 21 nt, Artificial Sequence
  Description of Artificial Sequence: Synthetic oligonucleotide
cuucuuguccagcuuuauuuu

SEQ ID NO: 236 - RNA, 21 nt, Artificial Sequence
  Description of Artificial Sequence: Synthetic oligonucleotide
uucuuguccagcuuuauuguu

SEQ ID NO: 237 - RNA, 21 nt, Artificial Sequence
  Description of Artificial Sequence: Synthetic oligonucleotide
ucuuguccagcuuuauugguu

SEQ ID NO: 238 - RNA, 21 nt, Artificial Sequence
  Description of Artificial Sequence: Synthetic oligonucleotide
cuuguccagcuuuauuggguu

SEQ ID NO: 239 - RNA, 21 nt, Artificial Sequence
  Description of Artificial Sequence: Synthetic oligonucleotide
uuguccagcuuuauugggauu

SEQ ID NO: 240 - RNA, 23 nt, Artificial Sequence
  Description of Artificial Sequence: Synthetic oligonucleotide
caauaaagcuggacaagaagcua

SEQ ID NO: 241 - RNA, 23 nt, Artificial Sequence
  Description of Artificial Sequence: Synthetic oligonucleotide
uggccucccaauaaagcuggaca

SEQ ID NO: 242 - RNA, 21 nt, Artificial Sequence
  Description of Artificial Sequence: Synthetic oligonucleotide
uagcuucuuguccagcuuuuu

SEQ ID NO: 243 - DNA, 25 bp, Artificial Sequence
  Description of Artificial Sequence: Synthetic oligonucleotide
  Description of Combined DNA/RNA Molecule: Synthetic oligonucleotide
uagcuucuuguccagctttattguu

SEQ ID NO: 244 - RNA, 21 nt, Artificial Sequence
  Description of Artificial Sequence: Synthetic oligonucleotide
uguccagcuuuauugggaguu

SEQ ID NO: 245 - RNA, 25 nt, Artificial Sequence
  Description of Artificial Sequence: Synthetic oligonucleotide
uguccagcuuuauugggaggccauu

SEQ ID NO: 246 - DNA, 21 bp, Artificial Sequence
  Description of Artificial Sequence: Synthetic oligonucleotide
  Description of Combined DNA/RNA Molecule: Synthetic oligonucleotide
tagcuucuuguccagcuuuuu

SEQ ID NO: 247 - DNA, 21 bp, Artificial Sequence
  Description of Artificial Sequence: Synthetic oligonucleotide
  Description of Combined DNA/RNA Molecule: Synthetic oligonucleotide
tagcuucuuguccagcuuuuu

SEQ ID NO: 248 - RNA, 20 nt, Artificial Sequence
  Description of Artificial Sequence: Synthetic oligonucleotide
agcuucuuguccagcuuuuu

SEQ ID NO: 249 - DNA, 25 bp, Artificial Sequence
  Description of Artificial Sequence: Synthetic oligonucleotide
  Description of Combined DNA/RNA Molecule: Synthetic oligonucleotide
tagcuucuuguccagctttattguu

SEQ ID NO: 250 - DNA, 25 bp, Artificial Sequence
  Description of Artificial Sequence: Synthetic oligonucleotide
  Description of Combined DNA/RNA Molecule: Synthetic oligonucleotide
tagcuucuuguccagctttattguu

SEQ ID NO: 251 - DNA, 24 bp, Artificial Sequence
  Description of Artificial Sequence: Synthetic oligonucleotide
  Description of Combined DNA/RNA Molecule: Synthetic oligonucleotide
agcuucuuguccagctttattguu

SEQ ID NO: 252 - DNA, 20 bp, Artificial Sequence
  Description of Artificial Sequence: Synthetic oligonucleotide
  Description of Combined DNA/RNA Molecule: Synthetic oligonucleotide
ugguaatccactttcagagg

SEQ ID NO: 253 - RNA, 19 nt, Artificial Sequence
  Description of Artificial Sequence: Synthetic oligonucleotide
uagcuucuuguccagcuuu

SEQ ID NO: 254 - RNA, 17 nt, Artificial Sequence
  Description of Artificial Sequence: Synthetic oligonucleotide
uagcuucuuguccaguu

SEQ ID NO: 255 - DNA, 21 bp, Artificial Sequence
  Description of Artificial Sequence: Synthetic oligonucleotide
  Description of Combined DNA/RNA Molecule: Synthetic oligonucleotide
tagctucutgtccagctutuu

SEQ ID NO: 256 - DNA, 21 bp, Artificial Sequence
  Description of Artificial Sequence: Synthetic oligonucleotide
  Description of Combined DNA/RNA Molecule: Synthetic oligonucleotide
tagctucttgtccagctutuu

SEQ ID NO: 257 - DNA, 21 bp, Artificial Sequence
  Description of Artificial Sequence: Synthetic oligonucleotide
  Description of Combined DNA/RNA Molecule: Synthetic oligonucleotide
tagctucutguccagctutuu

SEQ ID NO: 258 - DNA, 21 bp, Artificial Sequence
  Description of Artificial Sequence: Synthetic oligonucleotide
  Description of Combined DNA/RNA Molecule: Synthetic oligonucleotide
tagctucttguccagctutuu

SEQ ID NO: 259 - RNA, 19 nt, Artificial Sequence
  Description of Artificial Sequence: Synthetic oligonucleotide
uagcuucuuguccagcuuu

SEQ ID NO: 260 - RNA, 17 nt, Artificial Sequence
  Description of Artificial Sequence: Synthetic oligonucleotide
uagcuucuuguccaguu

SEQ ID NO: 261 - DNA, 21 bp, Artificial Sequence
  Description of Artificial Sequence: Synthetic oligonucleotide
  Description of Combined DNA/RNA Molecule: Synthetic oligonucleotide
tagctucutgtccagctutuu

SEQ ID NO: 262 - DNA, 21 bp, Artificial Sequence
  Description of Artificial Sequence: Synthetic oligonucleotide
  Description of Combined DNA/RNA Molecule: Synthetic oligonucleotide
tagctucttgtccagctutuu

SEQ ID NO: 263 - DNA, 21 bp, Artificial Sequence
  Description of Artificial Sequence: Synthetic oligonucleotide
  Description of Combined DNA/RNA Molecule: Synthetic oligonucleotide
tagctucutguccagctutuu

SEQ ID NO: 264 - DNA, 21 bp, Artificial Sequence
  Description of Artificial Sequence: Synthetic oligonucleotide
  Description of Combined DNA/RNA Molecule: Synthetic oligonucleotide
tagctucttguccagctutuu

SEQ ID NO: 265 - DNA, 25 bp, Artificial Sequence
  Description of Artificial Sequence: Synthetic oligonucleotide
  Description of Combined DNA/RNA Molecule: Synthetic oligonucleotide
tagctucutgtccagctttattguu

SEQ ID NO: 266 - DNA, 25 bp, Artificial Sequence
  Description of Artificial Sequence: Synthetic oligonucleotide
  Description of Combined DNA/RNA Molecule: Synthetic oligonucleotide
tagctucttgtccagctttattguu

SEQ ID NO: 267 - DNA, 23 bp, Artificial Sequence
  Description of Artificial Sequence: Synthetic oligonucleotide
  Description of Combined DNA/RNA Molecule: Synthetic oligonucleotide
tagcuucuuguccagctttatuu

SEQ ID NO: 268 - DNA, 21 bp, Artificial Sequence
  Description of Artificial Sequence: Synthetic oligonucleotide
  Description of Combined DNA/RNA Molecule: Synthetic oligonucleotide
tagcuucuuguccagctttuu

SEQ ID NO: 269 - DNA, 25 bp, Artificial Sequence
  Description of Artificial Sequence: Synthetic oligonucleotide
  Description of Combined DNA/RNA Molecule: Synthetic oligonucleotide
tagctucutguccagctttattguu

SEQ ID NO: 270 - DNA, 25 bp, Artificial Sequence
  Description of Artificial Sequence: Synthetic oligonucleotide
  Description of Combined DNA/RNA Molecule: Synthetic oligonucleotide
tagctucttguccagctttattguu

SEQ ID NO: 271 - DNA, 25 bp, Artificial Sequence
  Description of Artificial Sequence: Synthetic oligonucleotide
  Description of Combined DNA/RNA Molecule: Synthetic oligonucleotide
tagctucutgtccagctttattguu

SEQ ID NO: 272 - DNA, 25 bp, Artificial Sequence
  Description of Artificial Sequence: Synthetic oligonucleotide
  Description of Combined DNA/RNA Molecule: Synthetic oligonucleotide
tagctucttgtccagctttattguu

SEQ ID NO: 273 - DNA, 23 bp, Artificial Sequence
  Description of Artificial Sequence: Synthetic oligonucleotide
  Description of Combined DNA/RNA Molecule: Synthetic oligonucleotide
tagcuucuuguccagctttatuu

SEQ ID NO: 274 - DNA, 21 bp, Artificial Sequence
  Description of Artificial Sequence: Synthetic oligonucleotide
  Description of Combined DNA/RNA Molecule: Synthetic oligonucleotide
tagcuucuuguccagctttuu

SEQ ID NO: 275 - DNA, 25 bp, Artificial Sequence
  Description of Artificial Sequence: Synthetic oligonucleotide
  Description of Combined DNA/RNA Molecule: Synthetic oligonucleotide
tagctucutguccagctttattguu

SEQ ID NO: 276 - DNA, 25 bp, Artificial Sequence
  Description of Artificial Sequence: Synthetic oligonucleotide
  Description of Combined DNA/RNA Molecule: Synthetic oligonucleotide
tagctucttguccagctttattguu

SEQ ID NO: 277 - DNA, 21 bp, Artificial Sequence
  Description of Artificial Sequence: Synthetic oligonucleotide
  Description of Combined DNA/RNA Molecule: Synthetic oligonucleotide
tccucagucugcuucgcacuu

SEQ ID NO: 278 - DNA, 21 bp, Artificial Sequence
  Description of Artificial Sequence: Synthetic oligonucleotide
  Description of Combined DNA/RNA Molecule: Synthetic oligonucleotide
tccucagucugctucgcacuu

SEQ ID NO: 279 - DNA, 21 bp, Artificial Sequence
  Description of Artificial Sequence: Synthetic oligonucleotide
  Description of Combined DNA/RNA Molecule: Synthetic oligonucleotide
tccucagtcugctucgcacuu

SEQ ID NO: 280 - DNA, 21 bp, Artificial Sequence
  Description of Artificial Sequence: Synthetic oligonucleotide
  Description of Combined DNA/RNA Molecule: Synthetic oligonucleotide
tccucagucugctucgcacuu

SEQ ID NO: 281 - DNA, 21 bp, Artificial Sequence
  Description of Artificial Sequence: Synthetic oligonucleotide
  Description of Combined DNA/RNA Molecule: Synthetic oligonucleotide
tccucagtcugctucgcacuu

SEQ ID NO: 282 - DNA, 21 bp, Artificial Sequence
  Description of Artificial Sequence: Synthetic oligonucleotide
  Description of Combined DNA/RNA Molecule: Synthetic oligonucleotide
tccucagucugcuucgcacuu

SEQ ID NO: 283 - DNA, 21 bp, Artificial Sequence
  Description of Artificial Sequence: Synthetic oligonucleotide
  Description of Combined DNA/RNA Molecule: Synthetic oligonucleotide
tccucagucugctucgcacuu

SEQ ID NO: 284 - DNA, 21 bp, Artificial Sequence
  Description of Artificial Sequence: Synthetic oligonucleotide
  Description of Combined DNA/RNA Molecule: Synthetic oligonucleotide
tccucagtcugctucgcacuu

SEQ ID NO: 285 - DNA, 21 bp, Artificial Sequence
  Description of Artificial Sequence: Synthetic oligonucleotide
  Description of Combined DNA/RNA Molecule: Synthetic oligonucleotide
tccucagucugctucgcacuu

SEQ ID NO: 286 - DNA, 21 bp, Artificial Sequence
  Description of Artificial Sequence: Synthetic oligonucleotide
  Description of Combined DNA/RNA Molecule: Synthetic oligonucleotide
tccucagtcugctucgcacuu

SEQ ID NO: 287 - DNA, 25 bp, Artificial Sequence
  Description of Artificial Sequence: Synthetic oligonucleotide
  Description of Combined DNA/RNA Molecule: Synthetic oligonucleotide
tccucagucugcuucgcaccttcuu

SEQ ID NO: 288 - DNA, 25 bp, Artificial Sequence
  Description of Artificial Sequence: Synthetic oligonucleotide
  Description of Combined DNA/RNA Molecule: Synthetic oligonucleotide
tccucagucugctucgcaccttcuu

SEQ ID NO: 289 - DNA, 25 bp, Artificial Sequence
  Description of Artificial Sequence: Synthetic oligonucleotide
  Description of Combined DNA/RNA Molecule: Synthetic oligonucleotide
tccucagtcugctucgcaccttcuu

SEQ ID NO: 290 - DNA, 23 bp, Artificial Sequence
  Description of Artificial Sequence: Synthetic oligonucleotide
  Description of Combined DNA/RNA Molecule: Synthetic oligonucleotide
tccucagucugcuucgcacctuu

SEQ ID NO: 291 - DNA, 21 bp, Artificial Sequence
  Description of Artificial Sequence: Synthetic oligonucleotide
  Description of Combined DNA/RNA Molecule: Synthetic oligonucleotide
tccucagucugcuucgcacuu

SEQ ID NO: 292 - DNA, 25 bp, Artificial Sequence
  Description of Artificial Sequence: Synthetic oligonucleotide
  Description of Combined DNA/RNA Molecule: Synthetic oligonucleotide
tccucagucugctucgcaccttcuu

SEQ ID NO: 293 - DNA, 25 bp, Artificial Sequence
  Description of Artificial Sequence: Synthetic oligonucleotide
  Description of Combined DNA/RNA Molecule: Synthetic oligonucleotide
tccucagtcugctucgcaccttcuu

SEQ ID NO: 294 - DNA, 25 bp, Artificial Sequence
  Description of Artificial Sequence: Synthetic oligonucleotide
  Description of Combined DNA/RNA Molecule: Synthetic oligonucleotide
tccucagucugcuucgcaccttcuu

SEQ ID NO: 295 - DNA, 25 bp, Artificial Sequence
  Description of Artificial Sequence: Synthetic oligonucleotide
  Description of Combined DNA/RNA Molecule: Synthetic oligonucleotide
tccucagucugctucgcaccttcuu

SEQ ID NO: 296 - DNA, 25 bp, Artificial Sequence
  Description of Artificial Sequence: Synthetic oligonucleotide
  Description of Combined DNA/RNA Molecule: Synthetic oligonucleotide
tccucagtcugctucgcaccttcuu

SEQ ID NO: 297 - DNA, 23 bp, Artificial Sequence
  Description of Artificial Sequence: Synthetic oligonucleotide
  Description of Combined DNA/RNA Molecule: Synthetic oligonucleotide
tccucagucugcuucgcacctuu

SEQ ID NO: 298 - DNA, 21 bp, Artificial Sequence
  Description of Artificial Sequence: Synthetic oligonucleotide
  Description of Combined DNA/RNA Molecule: Synthetic oligonucleotide
tccucagucugcuucgcacuu

SEQ ID NO: 299 - DNA, 25 bp, Artificial Sequence
  Description of Artificial Sequence: Synthetic oligonucleotide
  Description of Combined DNA/RNA Molecule: Synthetic oligonucleotide
tccucagucugctucgcaccttcuu

SEQ ID NO: 300 - DNA, 25 bp, Artificial Sequence
  Description of Artificial Sequence: Synthetic oligonucleotide
  Description of Combined DNA/RNA Molecule: Synthetic oligonucleotide
tccucagtcugctucgcaccttcuu

SEQ ID NO: 301 - DNA, 21 bp, Artificial Sequence
  Description of Artificial Sequence: Synthetic oligonucleotide
  Description of Combined DNA/RNA Molecule: Synthetic oligonucleotide
tugcuucuuguccagcuuuuu

SEQ ID NO: 302 - DNA, 21 bp, Artificial Sequence
  Description of Artificial Sequence: Synthetic oligonucleotide
  Description of Combined DNA/RNA Molecule: Synthetic oligonucleotide
tugcuucuuguccagcuuuuu

SEQ ID NO: 303 - DNA, 20 bp, Artificial Sequence
  Description of Artificial Sequence: Synthetic oligonucleotide
  Description of Combined DNA/RNA Molecule: Synthetic oligonucleotide
agcuucttgtccagcuuuau

SEQ ID NO: 304 - DNA, 20 bp, Artificial Sequence
  Description of Artificial Sequence: Synthetic oligonucleotide
  Description of Combined DNA/RNA Molecule: Synthetic oligonucleotide
agcuucttgtccagcuuuau

SEQ ID NO: 305 - DNA, 20 bp, Artificial Sequence
  Description of Artificial Sequence: Synthetic oligonucleotide
  Description of Combined DNA/RNA Molecule: Synthetic oligonucleotide
agcuucttgtccagcuuuau

SEQ ID NO: 306 - DNA, 20 bp, Artificial Sequence
  Description of Artificial Sequence: Synthetic oligonucleotide
  Description of Combined DNA/RNA Molecule: Synthetic oligonucleotide
agcuucttgtccagcuuuau

SEQ ID NO: 307 - DNA, 21 bp, Artificial Sequence
  Description of Artificial Sequence: Synthetic oligonucleotide
  Description of Combined DNA/RNA Molecule: Synthetic oligonucleotide
tuccagcuuuauuagggacuu

SEQ ID NO: 308 - DNA, 21 bp, Artificial Sequence
  Description of Artificial Sequence: Synthetic oligonucleotide
  Description of Combined DNA/RNA Molecule: Synthetic oligonucleotide
tuccagcutuautagggacuu

SEQ ID NO: 309 - DNA, 20 bp, Artificial Sequence
  Description of Artificial Sequence: Synthetic oligonucleotide
tgtccagctttattgggagg

SEQ ID NO: 310 - DNA, 20 bp, Artificial Sequence
  Description of Artificial Sequence: Synthetic oligonucleotide
  Description of Combined DNA/RNA Molecule: Synthetic oligonucleotide
uguccagctttattgggagg

SEQ ID NO: 311 - DNA, 20 bp, Artificial Sequence
  Description of Artificial Sequence: Synthetic oligonucleotide
  Description of Combined DNA/RNA Molecule: Synthetic oligonucleotide
uguccagctttattgggagg

SEQ ID NO: 312 - DNA, 20 bp, Artificial Sequence
  Description of Artificial Sequence: Synthetic oligonucleotide
  Description of Combined DNA/RNA Molecule: Synthetic oligonucleotide
uguccagctttattgggagg

SEQ ID NO: 313 - DNA, 20 bp, Artificial Sequence
  Description of Artificial Sequence: Synthetic oligonucleotide
  Description of Combined DNA/RNA Molecule: Synthetic oligonucleotide
uguccagctttattgggagg

SEQ ID NO: 314 - DNA, 20 bp, Artificial Sequence
  Description of Artificial Sequence: Synthetic oligonucleotide
  Description of Combined DNA/RNA Molecule: Synthetic oligonucleotide
uguccagctttattgggagg

SEQ ID NO: 315 - DNA, 20 bp, Artificial Sequence
  Description of Artificial Sequence: Synthetic oligonucleotide
  Description of Combined DNA/RNA Molecule: Synthetic oligonucleotide
uguccagctttattgggagg

SEQ ID NO: 316 - DNA, 20 bp, Artificial Sequence
  Description of Artificial Sequence: Synthetic oligonucleotide
  Description of Combined DNA/RNA Molecule: Synthetic oligonucleotide
uguccagctttattgggagg

SEQ ID NO: 317 - DNA, 21 bp, Artificial Sequence
  Description of Artificial Sequence: Synthetic oligonucleotide
  Description of Combined DNA/RNA Molecule: Synthetic oligonucleotide
tagcuucuuguccagcuuuuu

SEQ ID NO: 318 - DNA, 21 bp, Artificial Sequence
  Description of Artificial Sequence: Synthetic oligonucleotide
  Description of Combined DNA/RNA Molecule: Synthetic oligonucleotide
tagcuucuuguccagcuuuuu

SEQ ID NO: 319 - DNA, 21 bp, Artificial Sequence
  Description of Artificial Sequence: Synthetic oligonucleotide
  Description of Combined DNA/RNA Molecule: Synthetic oligonucleotide
tagcuucuuguccagcuuuuu

SEQ ID NO: 320 - DNA, 21 bp, Artificial Sequence
  Description of Artificial Sequence: Synthetic oligonucleotide
  Description of Combined DNA/RNA Molecule: Synthetic oligonucleotide
tagcuucuuguccagcuuuuu

SEQ ID NO: 321 - RNA, 20 nt, Artificial Sequence
  Description of Artificial Sequence: Synthetic oligonucleotide
agcuucuuguccagcuuuuu

SEQ ID NO: 322 - RNA, 20 nt, Artificial Sequence
  Description of Artificial Sequence: Synthetic oligonucleotide
agcuucuuguccagcuuuuu

SEQ ID NO: 323 - RNA, 20 nt, Artificial Sequence
  Description of Artificial Sequence: Synthetic oligonucleotide
agcuucuuguccagcuuuuu

SEQ ID NO: 324 - DNA, 20 bp, Artificial Sequence
  Description of Artificial Sequence: Synthetic oligonucleotide
  Description of Combined DNA/RNA Molecule: Synthetic oligonucleotide
uguccagctttattgggagg

SEQ ID NO: 325 - DNA, 20 bp, Artificial Sequence
  Description of Artificial Sequence: Synthetic oligonucleotide
  Description of Combined DNA/RNA Molecule: Synthetic oligonucleotide
uguccagctttattgggagg

SEQ ID NO: 326 - DNA, 20 bp, Artificial Sequence
  Description of Artificial Sequence: Synthetic oligonucleotide
  Description of Combined DNA/RNA Molecule: Synthetic oligonucleotide
uguccagctttattgggagg

SEQ ID NO: 327 - DNA, 21 bp, Artificial Sequence
  Description of Artificial Sequence: Synthetic oligonucleotide
  Description of Combined DNA/RNA Molecule: Synthetic oligonucleotide
tauagcagcuucuuguccauu

SEQ ID NO: 328 - DNA, 21 bp, Artificial Sequence
  Description of Artificial Sequence: Synthetic oligonucleotide
  Description of Combined DNA/RNA Molecule: Synthetic oligonucleotide
tuagcagcuucuuguccaguu

SEQ ID NO: 329 - RNA, 21 nt, Artificial Sequence
  Description of Artificial Sequence: Synthetic oligonucleotide
aagcagcuucuuguccagcuu

SEQ ID NO: 330 - DNA, 21 bp, Artificial Sequence
  Description of Artificial Sequence: Synthetic oligonucleotide
  Description of Combined DNA/RNA Molecule: Synthetic oligonucleotide
tgcagcuucuuguccagcuuu

SEQ ID NO: 331 - DNA, 21 bp, Artificial Sequence
  Description of Artificial Sequence: Synthetic oligonucleotide
  Description of Combined DNA/RNA Molecule: Synthetic oligonucleotide
tcagcuucuuguccagcuuuu

SEQ ID NO: 332 - DNA, 21 bp, Artificial Sequence
  Description of Artificial Sequence: Synthetic oligonucleotide
  Description of Combined DNA/RNA Molecule: Synthetic oligonucleotide
tgcuucuuguccagcuuuauu

SEQ ID NO: 333 - DNA, 21 bp, Artificial Sequence
  Description of Artificial Sequence: Synthetic oligonucleotide
  Description of Combined DNA/RNA Molecule: Synthetic oligonucleotide
tcuucuuguccagcuuuauuu

SEQ ID NO: 334 - DNA, 21 bp, Artificial Sequence
  Description of Artificial Sequence: Synthetic oligonucleotide
  Description of Combined DNA/RNA Molecule: Synthetic oligonucleotide
tuucuuguccagcuuuauuuu

SEQ ID NO: 335 - RNA, 21 nt, Artificial Sequence
  Description of Artificial Sequence: Synthetic oligonucleotide
aucuuguccagcuuuauuguu

SEQ ID NO: 336 - RNA, 21 nt, Artificial Sequence
  Description of Artificial Sequence: Synthetic oligonucleotide
acuuguccagcuuuauugguu

SEQ ID NO: 337 - DNA, 21 bp, Artificial Sequence
  Description of Artificial Sequence: Synthetic oligonucleotide
  Description of Combined DNA/RNA Molecule: Synthetic oligonucleotide
tuuguccagcuuuauuggguu

SEQ ID NO: 338 - RNA, 21 nt, Artificial Sequence
  Description of Artificial Sequence: Synthetic oligonucleotide
auguccagcuuuauugggauu

SEQ ID NO: 339 - DNA, 20 bp, Artificial Sequence
  Description of Artificial Sequence: Synthetic oligonucleotide
  Description of Combined DNA/RNA Molecule: Synthetic oligonucleotide
uguccagctttattgggagg

SEQ ID NO: 340 - DNA, 20 bp, Artificial Sequence
  Description of Artificial Sequence: Synthetic oligonucleotide
  Description of Combined DNA/RNA Molecule: Synthetic oligonucleotide
uguccagctttattgggagg

SEQ ID NO: 341 - DNA, 20 bp, Artificial Sequence
  Description of Artificial Sequence: Synthetic oligonucleotide
  Description of Combined DNA/RNA Molecule: Synthetic oligonucleotide
uguccagctttattgggagg

SEQ ID NO: 342 - DNA, 21 bp, Artificial Sequence
  Description of Artificial Sequence: Synthetic oligonucleotide
  Description of Combined DNA/RNA Molecule: Synthetic oligonucleotide
uguccagcuuuauugggagtu

SEQ ID NO: 343 - DNA, 21 bp, Artificial Sequence
  Description of Artificial Sequence: Synthetic oligonucleotide
  Description of Combined DNA/RNA Molecule: Synthetic oligonucleotide
uguccagcuuuauugggagtu

SEQ ID NO: 344 - DNA, 25 bp, Artificial Sequence
  Description of Artificial Sequence: Synthetic oligonucleotide
  Description of Combined DNA/RNA Molecule: Synthetic oligonucleotide
uguccagcuuuauugggaggccatu

SEQ ID NO: 345 - DNA, 25 bp, Artificial Sequence
  Description of Artificial Sequence: Synthetic oligonucleotide
  Description of Combined DNA/RNA Molecule: Synthetic oligonucleotide
uguccagcuuuauugggaggccatu

SEQ ID NO: 346 - RNA, 19 nt, Artificial Sequence
  Description of Artificial Sequence: Synthetic oligonucleotide
uguccagcuuuauuggguu

SEQ ID NO: 347 - DNA, 19 bp, Artificial Sequence
  Description of Artificial Sequence: Synthetic oligonucleotide
  Description of Combined DNA/RNA Molecule: Synthetic oligonucleotide
uguccagcuuuauugggtu

SEQ ID NO: 348 - RNA, 17 nt, Artificial Sequence
  Description of Artificial Sequence: Synthetic oligonucleotide
uguccagcuuuauuguu

SEQ ID NO: 349 - DNA, 17 bp, Artificial Sequence
  Description of Artificial Sequence: Synthetic oligonucleotide
  Description of Combined DNA/RNA Molecule: Synthetic oligonucleotide
uguccagcuuuauugtu

SEQ ID NO: 350 - DNA, 21 bp, Artificial Sequence
  Description of Artificial Sequence: Synthetic oligonucleotide
  Description of Combined DNA/RNA Molecule: Synthetic oligonucleotide
tgtccagctutatugggaguu

SEQ ID NO: 351 - DNA, 21 bp, Artificial Sequence
  Description of Artificial Sequence: Synthetic oligonucleotide
  Description of Combined DNA/RNA Molecule: Synthetic oligonucleotide
tgtccagctutatugggaguu

SEQ ID NO: 352 - DNA, 21 bp, Artificial Sequence
  Description of Artificial Sequence: Synthetic oligonucleotide
  Description of Combined DNA/RNA Molecule: Synthetic oligonucleotide
tgtccagctuuatugggaguu

SEQ ID NO: 353 - DNA, 21 bp, Artificial Sequence
  Description of Artificial Sequence: Synthetic oligonucleotide
  Description of Combined DNA/RNA Molecule: Synthetic oligonucleotide
tgtccagctuuatugggaguu

SEQ ID NO: 354 - RNA, 21 nt, Artificial Sequence
  Description of Artificial Sequence: Synthetic oligonucleotide
aguccagcuuuauugggaguu

SEQ ID NO: 355 - RNA, 21 nt, Artificial Sequence
  Description of Artificial Sequence: Synthetic oligonucleotide
aguccagcuuuauugggaguu

SEQ ID NO: 356 - DNA, 20 bp, Artificial Sequence
  Description of Artificial Sequence: Synthetic oligonucleotide
  Description of Combined DNA/RNA Molecule: Synthetic oligonucleotide
uguccagctttattgggagg

SEQ ID NO: 357 - DNA, 20 bp, Artificial Sequence
  Description of Artificial Sequence: Synthetic oligonucleotide
  Description of Combined DNA/RNA Molecule: Synthetic oligonucleotide
uguccagctttattgggagg

SEQ ID NO: 358 - DNA, 20 bp, Artificial Sequence
  Description of Artificial Sequence: Synthetic oligonucleotide
  Description of Combined DNA/RNA Molecule: Synthetic oligonucleotide
uguccagctttattgggagg

SEQ ID NO: 359 - DNA, 20 bp, Artificial Sequence
  Description of Artificial Sequence: Synthetic oligonucleotide
  Description of Combined DNA/RNA Molecule: Synthetic oligonucleotide
uguccagctttattgggagg

SEQ ID NO: 360 - DNA, 20 bp, Artificial Sequence
  Description of Artificial Sequence: Synthetic oligonucleotide
  Description of Combined DNA/RNA Molecule: Synthetic oligonucleotide
uguccagctttattgggagg

SEQ ID NO: 361 - DNA, 20 bp, Artificial Sequence
  Description of Artificial Sequence: Synthetic oligonucleotide
  Description of Combined DNA/RNA Molecule: Synthetic oligonucleotide
uguccagctttattgggagg

SEQ ID NO: 362 - DNA, 20 bp, Artificial Sequence
  Description of Artificial Sequence: Synthetic oligonucleotide
  Description of Combined DNA/RNA Molecule: Synthetic oligonucleotide
uguccagctttattgggagg

SEQ ID NO: 363 - DNA, 20 bp, Artificial Sequence
  Description of Artificial Sequence: Synthetic oligonucleotide
  Description of Combined DNA/RNA Molecule: Synthetic oligonucleotide
uguccagctttattgggagg

SEQ ID NO: 364 - DNA, 21 bp, Artificial Sequence
  Description of Artificial Sequence: Synthetic oligonucleotide
  Description of Combined DNA/RNA Molecule: Synthetic oligonucleotide
tguccagcuuuauugggagtu

SEQ ID NO: 365 - DNA, 21 bp, Artificial Sequence
  Description of Artificial Sequence: Synthetic oligonucleotide
  Description of Combined DNA/RNA Molecule: Synthetic oligonucleotide
tguccagcuuuauugggagtu

SEQ ID NO: 366 - DNA, 25 bp, Artificial Sequence
  Description of Artificial Sequence: Synthetic oligonucleotide
  Description of Combined DNA/RNA Molecule: Synthetic oligonucleotide
tguccagcuuuauugggaggccatu

SEQ ID NO: 367 - DNA, 25 bp, Artificial Sequence
  Description of Artificial Sequence: Synthetic oligonucleotide
  Description of Combined DNA/RNA Molecule: Synthetic oligonucleotide
tguccagcuuuauugggaggccatu

SEQ ID NO: 368 - DNA, 21 bp, Artificial Sequence
  Description of Artificial Sequence: Synthetic oligonucleotide
  Description of Combined DNA/RNA Molecule: Synthetic oligonucleotide
tguccagcuuuauugggagtu

SEQ ID NO: 369 - DNA, 21 bp, Artificial Sequence
  Description of Artificial Sequence: Synthetic oligonucleotide
  Description of Combined DNA/RNA Molecule: Synthetic oligonucleotide
tguccagcuuuauugggagtu

SEQ ID NO: 370 - DNA, 25 bp, Artificial Sequence
  Description of Artificial Sequence: Synthetic oligonucleotide
  Description of Combined DNA/RNA Molecule: Synthetic oligonucleotide
tguccagcuuuauugggaggccatu

SEQ ID NO: 371 - DNA, 20 bp, Artificial Sequence
  Description of Artificial Sequence: Synthetic oligonucleotide
  Description of Combined DNA/RNA Molecule: Synthetic oligonucleotide
uguccagctttattgggagg

SEQ ID NO: 372 - DNA, 20 bp, Artificial Sequence
  Description of Artificial Sequence: Synthetic oligonucleotide
  Description of Combined DNA/RNA Molecule: Synthetic oligonucleotide
uguccagctttattgggagg

SEQ ID NO: 373 - DNA, 20 bp, Artificial Sequence
  Description of Artificial Sequence: Synthetic oligonucleotide
  Description of Combined DNA/RNA Molecule: Synthetic oligonucleotide
uguccagctttattgggagg

SEQ ID NO: 374 - DNA, 21 bp, Artificial Sequence
  Description of Artificial Sequence: Synthetic oligonucleotide
  Description of Combined DNA/RNA Molecule: Synthetic oligonucleotide
tguccagcuuuauugggagtu

SEQ ID NO: 375 - DNA, 21 bp, Artificial Sequence
  Description of Artificial Sequence: Synthetic oligonucleotide
  Description of Combined DNA/RNA Molecule: Synthetic oligonucleotide
tguccagcuuuauugggagtu

SEQ ID NO: 376 - DNA, 21 bp, Artificial Sequence
  Description of Artificial Sequence: Synthetic oligonucleotide
  Description of Combined DNA/RNA Molecule: Synthetic oligonucleotide
tauagcagcuucuuguccatu

SEQ ID NO: 377 - DNA, 21 bp, Artificial Sequence
  Description of Artificial Sequence: Synthetic oligonucleotide
  Description of Combined DNA/RNA Molecule: Synthetic oligonucleotide
tuagcagcuucuuguccagtu

SEQ ID NO: 378 - DNA, 21 bp, Artificial Sequence
  Description of Artificial Sequence: Synthetic oligonucleotide
  Description of Combined DNA/RNA Molecule: Synthetic oligonucleotide
tagcagcuucuuguccagctu

SEQ ID NO: 379 - DNA, 21 bp, Artificial Sequence
  Description of Artificial Sequence: Synthetic oligonucleotide
  Description of Combined DNA/RNA Molecule: Synthetic oligonucleotide
tgcagcuucuuguccagcutu

SEQ ID NO: 380 - DNA, 21 bp, Artificial Sequence
  Description of Artificial Sequence: Synthetic oligonucleotide
  Description of Combined DNA/RNA Molecule: Synthetic oligonucleotide
tcagcuucuuguccagcuutu

SEQ ID NO: 381 - DNA, 21 bp, Artificial Sequence
  Description of Artificial Sequence: Synthetic oligonucleotide
  Description of Combined DNA/RNA Molecule: Synthetic oligonucleotide
tgcuucuuguccagcuuuatu

SEQ ID NO: 382 - DNA, 21 bp, Artificial Sequence
  Description of Artificial Sequence: Synthetic oligonucleotide
  Description of Combined DNA/RNA Molecule: Synthetic oligonucleotide
tcuucuuguccagcuuuautu

SEQ ID NO: 383 - DNA, 21 bp, Artificial Sequence
  Description of Artificial Sequence: Synthetic oligonucleotide
  Description of Combined DNA/RNA Molecule: Synthetic oligonucleotide
tuucuuguccagcuuuauutu

SEQ ID NO: 384 - DNA, 21 bp, Artificial Sequence
  Description of Artificial Sequence: Synthetic oligonucleotide
  Description of Combined DNA/RNA Molecule: Synthetic oligonucleotide
tucuuguccagcuuuauugtu

SEQ ID NO: 385 - DNA, 21 bp, Artificial Sequence
  Description of Artificial Sequence: Synthetic oligonucleotide
  Description of Combined DNA/RNA Molecule: Synthetic oligonucleotide
tcuuguccagcuuuauuggtu

SEQ ID NO: 386 - DNA, 21 bp, Artificial Sequence
  Description of Artificial Sequence: Synthetic oligonucleotide
  Description of Combined DNA/RNA Molecule: Synthetic oligonucleotide
tuuguccagcuuuauugggtu

SEQ ID NO: 387 - DNA, 21 bp, Artificial Sequence
  Description of Artificial Sequence: Synthetic oligonucleotide
  Description of Combined DNA/RNA Molecule: Synthetic oligonucleotide
tuguccagcuuuauugggatu

SEQ ID NO: 388 - DNA, 21 bp, Artificial Sequence
  Description of Artificial Sequence: Synthetic oligonucleotide
  Description of Combined DNA/RNA Molecule: Synthetic oligonucleotide
tagcuucuuguccagcuuutu

SEQ ID NO: 389 - DNA, 21 bp, Artificial Sequence
  Description of Artificial Sequence: Synthetic oligonucleotide
  Description of Combined DNA/RNA Molecule: Synthetic oligonucleotide
tggucucaggcagccacggtu

SEQ ID NO: 390 - DNA, 21 bp, Artificial Sequence
  Description of Artificial Sequence: Synthetic oligonucleotide
  Description of Combined DNA/RNA Molecule: Synthetic oligonucleotide
tauagcagcuucuuguccatu

SEQ ID NO: 391 - DNA, 21 bp, Artificial Sequence
  Description of Artificial Sequence: Synthetic oligonucleotide
  Description of Combined DNA/RNA Molecule: Synthetic oligonucleotide
tuagcagcuucuuguccagtu

SEQ ID NO: 392 - DNA, 21 bp, Artificial Sequence
  Description of Artificial Sequence: Synthetic oligonucleotide
  Description of Combined DNA/RNA Molecule: Synthetic oligonucleotide
tagcagcuucuuguccagctu

SEQ ID NO: 393 - DNA, 21 bp, Artificial Sequence
  Description of Artificial Sequence: Synthetic oligonucleotide
  Description of Combined DNA/RNA Molecule: Synthetic oligonucleotide
tgcagcuucuuguccagcutu

SEQ ID NO: 394 - DNA, 21 bp, Artificial Sequence
  Description of Artificial Sequence: Synthetic oligonucleotide
  Description of Combined DNA/RNA Molecule: Synthetic oligonucleotide
tcagcuucuuguccagcuutu

SEQ ID NO: 395 - DNA, 21 bp, Artificial Sequence
  Description of Artificial Sequence: Synthetic oligonucleotide
  Description of Combined DNA/RNA Molecule: Synthetic oligonucleotide
tgcuucuuguccagcuuuatu

SEQ ID NO: 396 - DNA, 21 bp, Artificial Sequence
  Description of Artificial Sequence: Synthetic oligonucleotide
  Description of Combined DNA/RNA Molecule: Synthetic oligonucleotide
tcuucuuguccagcuuuautu

SEQ ID NO: 397 - DNA, 21 bp, Artificial Sequence
  Description of Artificial Sequence: Synthetic oligonucleotide
  Description of Combined DNA/RNA Molecule: Synthetic oligonucleotide
tuucuuguccagcuuuauutu

SEQ ID NO: 398 - DNA, 21 bp, Artificial Sequence
  Description of Artificial Sequence: Synthetic oligonucleotide
  Description of Combined DNA/RNA Molecule: Synthetic oligonucleotide
tucuuguccagcuuuauugtu

SEQ ID NO: 399 - DNA, 21 bp, Artificial Sequence
  Description of Artificial Sequence: Synthetic oligonucleotide
  Description of Combined DNA/RNA Molecule: Synthetic oligonucleotide
tcuuguccagcuuuauuggtu

SEQ ID NO: 400 - DNA, 21 bp, Artificial Sequence
  Description of Artificial Sequence: Synthetic oligonucleotide
  Description of Combined DNA/RNA Molecule: Synthetic oligonucleotide
tuuguccagcuuuauugggtu

SEQ ID NO: 401 - DNA, 21 bp, Artificial Sequence
  Description of Artificial Sequence: Synthetic oligonucleotide
  Description of Combined DNA/RNA Molecule: Synthetic oligonucleotide
tuguccagcuuuauugggatu

SEQ ID NO: 402 - DNA, 21 bp, Artificial Sequence
  Description of Artificial Sequence: Synthetic oligonucleotide
  Description of Combined DNA/RNA Molecule: Synthetic oligonucleotide
tagcuucuuguccagcuuutu

SEQ ID NO: 403 - DNA, 21 bp, Artificial Sequence
  Description of Artificial Sequence: Synthetic oligonucleotide
  Description of Combined DNA/RNA Molecule: Synthetic oligonucleotide
tggucucaggcagccacggtu

SEQ ID NO: 404 - DNA, 21 bp, Artificial Sequence
  Description of Artificial Sequence: Synthetic oligonucleotide
  Description of Combined DNA/RNA Molecule: Synthetic oligonucleotide
tagcuucuuguccagcuuutu

SEQ ID NO: 405 - DNA, 21 bp, Artificial Sequence
  Description of Artificial Sequence: Synthetic oligonucleotide
  Description of Combined DNA/RNA Molecule: Synthetic oligonucleotide
tagcuucuuguccagcuuutu

SEQ ID NO: 406 - DNA, 21 bp, Artificial Sequence
  Description of Artificial Sequence: Synthetic oligonucleotide
  Description of Combined DNA/RNA Molecule: Synthetic oligonucleotide
tagcuucuuguccagcuuutu

SEQ ID NO: 407 - DNA, 21 bp, Artificial Sequence
  Description of Artificial Sequence: Synthetic oligonucleotide
  Description of Combined DNA/RNA Molecule: Synthetic oligonucleotide
tagcuucuuguccagcuuutu

SEQ ID NO: 408 - DNA, 21 bp, Artificial Sequence
  Description of Artificial Sequence: Synthetic oligonucleotide
  Description of Combined DNA/RNA Molecule: Synthetic oligonucleotide
tagcuucuuguccagcuuutu

SEQ ID NO: 409 - DNA, 21 bp, Artificial Sequence
  Description of Artificial Sequence: Synthetic oligonucleotide
  Description of Combined DNA/RNA Molecule: Synthetic oligonucleotide
tguccagcuuuauugggagtu

SEQ ID NO: 410 - DNA, 21 bp, Artificial Sequence
  Description of Artificial Sequence: Synthetic oligonucleotide
  Description of Combined DNA/RNA Molecule: Synthetic oligonucleotide
tguccagcuuuauugggagtu

SEQ ID NO: 411 - DNA, 21 bp, Artificial Sequence
  Description of Artificial Sequence: Synthetic oligonucleotide
  Description of Combined DNA/RNA Molecule: Synthetic oligonucleotide
tguccagcuuuauugggagtu

SEQ ID NO: 412 - DNA, 20 bp, Artificial Sequence
  Description of Artificial Sequence: Synthetic oligonucleotide
  Description of Combined DNA/RNA Molecule: Synthetic oligonucleotide
uguccagctttattgggagg

SEQ ID NO: 413 - DNA, 20 bp, Artificial Sequence
  Description of Artificial Sequence: Synthetic oligonucleotide
  Description of Combined DNA/RNA Molecule: Synthetic oligonucleotide
uguccagctttattgggagg

SEQ ID NO: 414 - DNA, 20 bp, Artificial Sequence
  Description of Artificial Sequence: Synthetic oligonucleotide
  Description of Combined DNA/RNA Molecule: Synthetic oligonucleotide
uguccagctttattgggagg

SEQ ID NO: 415 - DNA, 20 bp, Artificial Sequence
  Description of Artificial Sequence: Synthetic oligonucleotide
  Description of Combined DNA/RNA Molecule: Synthetic oligonucleotide
uguccagctttattgggagg

SEQ ID NO: 416 - DNA, 20 bp, Artificial Sequence
  Description of Artificial Sequence: Synthetic oligonucleotide
  Description of Combined DNA/RNA Molecule: Synthetic oligonucleotide
uguccagctttattgggagg

SEQ ID NO: 417 - DNA, 20 bp, Artificial Sequence
  Description of Artificial Sequence: Synthetic oligonucleotide
  Description of Combined DNA/RNA Molecule: Synthetic oligonucleotide
uguccagctttattgggagg

SEQ ID NO: 418 - DNA, 20 bp, Artificial Sequence
  Description of Artificial Sequence: Synthetic oligonucleotide
  Description of Combined DNA/RNA Molecule: Synthetic oligonucleotide
uguccagctttattgggagg

SEQ ID NO: 419 - DNA, 20 bp, Artificial Sequence
  Description of Artificial Sequence: Synthetic oligonucleotide
  Description of Combined DNA/RNA Molecule: Synthetic oligonucleotide
uguccagctttattgggagg

SEQ ID NO: 420 - DNA, 20 bp, Artificial Sequence
  Description of Artificial Sequence: Synthetic oligonucleotide
  Description of Combined DNA/RNA Molecule: Synthetic oligonucleotide
uguccagctttattgggagg

SEQ ID NO: 421 - DNA, 20 bp, Artificial Sequence
  Description of Artificial Sequence: Synthetic oligonucleotide
  Description of Combined DNA/RNA Molecule: Synthetic oligonucleotide
uguccagctttattgggagg

SEQ ID NO: 422 - DNA, 20 bp, Artificial Sequence
  Description of Artificial Sequence: Synthetic oligonucleotide
  Description of Combined DNA/RNA Molecule: Synthetic oligonucleotide
uguccagctttattgggagg

SEQ ID NO: 423 - DNA, 20 bp, Artificial Sequence
  Description of Artificial Sequence: Synthetic oligonucleotide
  Description of Combined DNA/RNA Molecule: Synthetic oligonucleotide
uguccagctttattgggagg

SEQ ID NO: 424 - DNA, 20 bp, Artificial Sequence
  Description of Artificial Sequence: Synthetic oligonucleotide
  Description of Combined DNA/RNA Molecule: Synthetic oligonucleotide
uguccagctttattgggagg

SEQ ID NO: 425 - DNA, 20 bp, Artificial Sequence
  Description of Artificial Sequence: Synthetic oligonucleotide
  Description of Combined DNA/RNA Molecule: Synthetic oligonucleotide
uguccagctttattgggagg

SEQ ID NO: 426 - DNA, 20 bp, Artificial Sequence
  Description of Artificial Sequence: Synthetic oligonucleotide
  Description of Combined DNA/RNA Molecule: Synthetic oligonucleotide
uguccagctttattgggagg

SEQ ID NO: 427 - DNA, 20 bp, Artificial Sequence
  Description of Artificial Sequence: Synthetic oligonucleotide
  Description of Combined DNA/RNA Molecule: Synthetic oligonucleotide
uguccagctttattgggagg

SEQ ID NO: 428 - DNA, 20 bp, Artificial Sequence
  Description of Artificial Sequence: Synthetic oligonucleotide
  Description of Combined DNA/RNA Molecule: Synthetic oligonucleotide
uguccagctttattgggagg

SEQ ID NO: 429 - DNA, 20 bp, Artificial Sequence
  Description of Artificial Sequence: Synthetic oligonucleotide
  Description of Combined DNA/RNA Molecule: Synthetic oligonucleotide
uguccagctttattgggagg

SEQ ID NO: 430 - DNA, 20 bp, Artificial Sequence
  Description of Artificial Sequence: Synthetic oligonucleotide
  Description of Combined DNA/RNA Molecule: Synthetic oligonucleotide
uguccagctttattgggagg

SEQ ID NO: 431 - DNA, 20 bp, Artificial Sequence
  Description of Artificial Sequence: Synthetic oligonucleotide
  Description of Combined DNA/RNA Molecule: Synthetic oligonucleotide
uguccagctttattgggagg

SEQ ID NO: 432 - DNA, 20 bp, Artificial Sequence
  Description of Artificial Sequence: Synthetic oligonucleotide
  Description of Combined DNA/RNA Molecule: Synthetic oligonucleotide
uguccagctttattgggagg

SEQ ID NO: 433 - DNA, 20 bp, Artificial Sequence
  Description of Artificial Sequence: Synthetic oligonucleotide
  Description of Combined DNA/RNA Molecule: Synthetic oligonucleotide
uguccagctttattgggagg

SEQ ID NO: 434 - DNA, 20 bp, Artificial Sequence
  Description of Artificial Sequence: Synthetic oligonucleotide
  Description of Combined DNA/RNA Molecule: Synthetic oligonucleotide
uguccagctttattgggagg

SEQ ID NO: 435 - DNA, 20 bp, Artificial Sequence
  Description of Artificial Sequence: Synthetic oligonucleotide
  Description of Combined DNA/RNA Molecule: Synthetic oligonucleotide
uguccagctttattgggagg

SEQ ID NO: 436 - DNA, 20 bp, Artificial Sequence
  Description of Artificial Sequence: Synthetic oligonucleotide
  Description of Combined DNA/RNA Molecule: Synthetic oligonucleotide
uguccagctttattgggagg

SEQ ID NO: 437 - DNA, 20 bp, Artificial Sequence
  Description of Artificial Sequence: Synthetic oligonucleotide
  Description of Combined DNA/RNA Molecule: Synthetic oligonucleotide
uguccagctttattgggagg

SEQ ID NO: 438 - DNA, 20 bp, Artificial Sequence
  Description of Artificial Sequence: Synthetic oligonucleotide
  Description of Combined DNA/RNA Molecule: Synthetic oligonucleotide
uguccagctttattgggagg

SEQ ID NO: 439 - DNA, 20 bp, Artificial Sequence
  Description of Artificial Sequence: Synthetic oligonucleotide
  Description of Combined DNA/RNA Molecule: Synthetic oligonucleotide
uguccagctttattgggagg

SEQ ID NO: 440 - DNA, 20 bp, Artificial Sequence
  Description of Artificial Sequence: Synthetic oligonucleotide
  Description of Combined DNA/RNA Molecule: Synthetic oligonucleotide
uguccagctttattgggagg

SEQ ID NO: 441 - DNA, 20 bp, Artificial Sequence
  Description of Artificial Sequence: Synthetic oligonucleotide
  Description of Combined DNA/RNA Molecule: Synthetic oligonucleotide
uguccagctttattgggagg

SEQ ID NO: 442 - DNA, 20 bp, Artificial Sequence
  Description of Artificial Sequence: Synthetic oligonucleotide
  Description of Combined DNA/RNA Molecule: Synthetic oligonucleotide
uguccagctttattgggagg

SEQ ID NO: 443 - DNA, 20 bp, Artificial Sequence
  Description of Artificial Sequence: Synthetic oligonucleotide
  Description of Combined DNA/RNA Molecule: Synthetic oligonucleotide
uguccagctttattgggagg

SEQ ID NO: 444 - DNA, 21 bp, Artificial Sequence
  Description of Artificial Sequence: Synthetic oligonucleotide
  Description of Combined DNA/RNA Molecule: Synthetic oligonucleotide
tagcuucuuguccagcuuutu

SEQ ID NO: 445 - DNA, 21 bp, Artificial Sequence
  Description of Artificial Sequence: Synthetic oligonucleotide
  Description of Combined DNA/RNA Molecule: Synthetic oligonucleotide
tagcuucuuguccagcuuutu

SEQ ID NO: 446 - DNA, 21 bp, Artificial Sequence
  Description of Artificial Sequence: Synthetic oligonucleotide
  Description of Combined DNA/RNA Molecule: Synthetic oligonucleotide
tagcuucuuguccagcuuutu

SEQ ID NO: 447 - DNA, 21 bp, Artificial Sequence
  Description of Artificial Sequence: Synthetic oligonucleotide
  Description of Combined DNA/RNA Molecule: Synthetic oligonucleotide
tguccagcuuuauugggagtu

SEQ ID NO: 448 - DNA, 21 bp, Artificial Sequence
  Description of Artificial Sequence: Synthetic oligonucleotide
  Description of Combined DNA/RNA Molecule: Synthetic oligonucleotide
tguccagcuuuauugggagtu

SEQ ID NO: 449 - RNA, 20 nt, Artificial Sequence
  Description of Artificial Sequence: Synthetic oligonucleotide
ccucccaauaaagcuggaca

SEQ ID NO: 450 - DNA, 21 bp, Artificial Sequence
  Description of Artificial Sequence: Synthetic oligonucleotide
  Description of Combined DNA/RNA Molecule: Synthetic oligonucleotide
tguccagcuuuauugggagtu

SEQ ID NO: 451 - DNA, 21 bp, Artificial Sequence
  Description of Artificial Sequence: Synthetic oligonucleotide
  Description of Combined DNA/RNA Molecule: Synthetic oligonucleotide
tguccagcuuuauugggagtu

SEQ ID NO: 452 - DNA, 20 bp, Artificial Sequence
  Description of Artificial Sequence: Synthetic oligonucleotide
tgtccagctttattgggagg

SEQ ID NO: 453 - DNA, 20 bp, Artificial Sequence
  Description of Artificial Sequence: Synthetic oligonucleotide
  Description of Combined DNA/RNA Molecule: Synthetic oligonucleotide
agcuucttgtccagcuuuau

SEQ ID NO: 454 - DNA, 20 bp, Artificial Sequence
  Description of Artificial Sequence: Synthetic oligonucleotide
agcttcttgtccagctttat

SEQ ID NO: 455 - RNA, 24 nt, Artificial Sequence
  Description of Artificial Sequence: Synthetic oligonucleotide
ccaccaagaccgccaaggaugcac

SEQ ID NO: 456 - RNA, 24 nt, Artificial Sequence
  Description of Artificial Sequence: Synthetic oligonucleotide
accgccaaggaugcacugagcagc

SEQ ID NO: 457 - RNA, 24 nt, Artificial Sequence
  Description of Artificial Sequence: Synthetic oligonucleotide
agcagcgugcaggagucccaggug

SEQ ID NO: 458 - RNA, 24 nt, Artificial Sequence
  Description of Artificial Sequence: Synthetic oligonucleotide
ggagucccagguggcccagcaggc

SEQ ID NO: 459 - RNA, 24 nt, Artificial Sequence
  Description of Artificial Sequence: Synthetic oligonucleotide
caggggcugggugaccgauggcuu

SEQ ID NO: 460 - RNA, 24 nt, Artificial Sequence
  Description of Artificial Sequence: Synthetic oligonucleotide
ggcugggugaccgauggcuucagu

SEQ ID NO: 461 - RNA, 24 nt, Artificial Sequence
  Description of Artificial Sequence: Synthetic oligonucleotide
cuggagcaccguuaaggacaaguu

SEQ ID NO: 462 - RNA, 24 nt, Artificial Sequence
  Description of Artificial Sequence: Synthetic oligonucleotide
cagccguggcugccugagaccuca

SEQ ID NO: 463 - RNA, 24 nt, Artificial Sequence
  Description of Artificial Sequence: Synthetic oligonucleotide
gccguggcugccugagaccucaau

SEQ ID NO: 464 - RNA, 25 nt, Artificial Sequence
  Description of Artificial Sequence: Synthetic oligonucleotide
cuuggguccugcaaucuccagggcu

SEQ ID NO: 465 - RNA, 24 nt, Artificial Sequence
  Description of Artificial Sequence: Synthetic oligonucleotide
cuggccucccaauaaagcuggaca

SEQ ID NO: 466 - RNA, 24 nt, Artificial Sequence
  Description of Artificial Sequence: Synthetic oligonucleotide
ggccucccaauaaagcuggacaag

SEQ ID NO: 467 - RNA, 32 nt, Artificial Sequence
  Description of Artificial Sequence: Synthetic oligonucleotide
augcacugagcagcgugcaggagucccaggug

SEQ ID NO: 468 - RNA, 31 nt, Artificial Sequence
  Description of Artificial Sequence: Synthetic oligonucleotide
ggccaggggcugggugaccgauggcuucagu

SEQ ID NO: 469 - RNA, 30 nt, Artificial Sequence
  Description of Artificial Sequence: Synthetic oligonucleotide
cuucagccguggcugccugagaccucaaua

SEQ ID NO: 470 - RNA, 29 nt, Artificial Sequence
  Description of Artificial Sequence: Synthetic oligonucleotide
cuccuuggguccugcaacuccagggcugc

SEQ ID NO: 471 - RNA, 30 nt, Artificial Sequence
  Description of Artificial Sequence: Synthetic oligonucleotide
gcuggccucccaauaaagcuggacaagaag

SEQ ID NO: 472 - DNA, 21 bp, Artificial Sequence
  Description of Artificial Sequence: Synthetic oligonucleotide
  Description of Combined DNA/RNA Molecule: Synthetic oligonucleotide
tguccagcuuuauugggaguu

SEQ ID NO: 473 - DNA, 21 bp, Artificial Sequence
  Description of Artificial Sequence: Synthetic oligonucleotide
  Description of Combined DNA/RNA Molecule: Synthetic oligonucleotide
aguccagcuuuauugggagtu

SEQ ID NO: 474 - DNA, 21 bp, Artificial Sequence
  Description of Artificial Sequence: Synthetic oligonucleotide
  Description of Combined DNA/RNA Molecule: Synthetic oligonucleotide
tguccagcuuuauugggaguu

SEQ ID NO: 475 - DNA, 21 bp, Artificial Sequence
  Description of Artificial Sequence: Synthetic oligonucleotide
  Description of Combined DNA/RNA Molecule: Synthetic oligonucleotide
aguccagcuuuauugggagtu

SEQ ID NO: 476 - DNA, 20 bp, Artificial Sequence
  Description of Artificial Sequence: Synthetic oligonucleotide
  Description of Combined DNA/RNA Molecule: Synthetic oligonucleotide
guccagcuuuauugggagtu

SEQ ID NO: 477 - DNA, 20 bp, Artificial Sequence
  Description of Artificial Sequence: Synthetic oligonucleotide
  Description of Combined DNA/RNA Molecule: Synthetic oligonucleotide
guccagcuuuauugggagtu

SEQ ID NO: 478 - DNA, 20 bp, Artificial Sequence
  Description of Artificial Sequence: Synthetic oligonucleotide
  Description of Combined DNA/RNA Molecule: Synthetic oligonucleotide
guccagcuuuauugggagtu

SEQ ID NO: 479 - DNA, 21 bp, Artificial Sequence
  Description of Artificial Sequence: Synthetic oligonucleotide
  Description of Combined DNA/RNA Molecule: Synthetic oligonucleotide
tguccagcuuuauugggagtu

SEQ ID NO: 480 - DNA, 20 bp, Artificial Sequence
  Description of Artificial Sequence: Synthetic oligonucleotide
tgtccagctttattgggagg

SEQ ID NO: 481 - DNA, 20 bp, Artificial Sequence
  Description of Artificial Sequence: Synthetic oligonucleotide
agcttcttgtccagctttat

SEQ ID NO: 482 - DNA, 20 bp, Artificial Sequence
  Description of Artificial Sequence: Synthetic oligonucleotide
tgtccagctttattgggagg

SEQ ID NO: 483 - DNA, 20 bp, Artificial Sequence
  Description of Artificial Sequence: Synthetic oligonucleotide
agcttcttgtccagctttat

SEQ ID NO: 484 - DNA, 20 bp, Artificial Sequence
  Description of Artificial Sequence: Synthetic oligonucleotide
  Description of Combined DNA/RNA Molecule: Synthetic oligonucleotide
agcuucttgtccagcuuuau

SEQ ID NO: 485 - DNA, 20 bp, Artificial Sequence
  Description of Artificial Sequence: Synthetic oligonucleotide
  Description of Combined DNA/RNA Molecule: Synthetic oligonucleotide
gcauccttggcggtcuuggu

SEQ ID NO: 486 - DNA, 20 bp, Artificial Sequence
  Description of Artificial Sequence: Synthetic oligonucleotide
  Description of Combined DNA/RNA Molecule: Synthetic oligonucleotide
ugcucagtgcatcctuggcg

SEQ ID NO: 487 - DNA, 20 bp, Artificial Sequence
  Description of Artificial Sequence: Synthetic oligonucleotide
  Description of Combined DNA/RNA Molecule: Synthetic oligonucleotide
ccugggactcctgcacgcug

SEQ ID NO: 488 - DNA, 20 bp, Artificial Sequence
  Description of Artificial Sequence: Synthetic oligonucleotide
  Description of Combined DNA/RNA Molecule: Synthetic oligonucleotide
cugcugggccacctgggacu

SEQ ID NO: 489 - DNA, 20 bp, Artificial Sequence
  Description of Artificial Sequence: Synthetic oligonucleotide
  Description of Combined DNA/RNA Molecule: Synthetic oligonucleotide
gccaucggtcacccagcccc

SEQ ID NO: 490 - DNA, 20 bp, Artificial Sequence
  Description of Artificial Sequence: Synthetic oligonucleotide
  Description of Combined DNA/RNA Molecule: Synthetic oligonucleotide
ugaagccatcggtcacccag

SEQ ID NO: 491 - DNA, 20 bp, Artificial Sequence
  Description of Artificial Sequence: Synthetic oligonucleotide
  Description of Combined DNA/RNA Molecule: Synthetic oligonucleotide
cuuguccttaacggtgcucc

SEQ ID NO: 492 - DNA, 20 bp, Artificial Sequence
  Description of Artificial Sequence: Synthetic oligonucleotide
  Description of Combined DNA/RNA Molecule: Synthetic oligonucleotide
agguctcaggcagccacggc

SEQ ID NO: 493 - DNA, 20 bp, Artificial Sequence
  Description of Artificial Sequence: Synthetic oligonucleotide
  Description of Combined DNA/RNA Molecule: Synthetic oligonucleotide
ugaggtctcaggcagccacg

SEQ ID NO: 494 - DNA, 20 bp, Artificial Sequence
  Description of Artificial Sequence: Synthetic oligonucleotide
  Description of Combined DNA/RNA Molecule: Synthetic oligonucleotide
ccuggagattgcaggaccca

SEQ ID NO: 495 - DNA, 20 bp, Artificial Sequence
  Description of Artificial Sequence: Synthetic oligonucleotide
  Description of Combined DNA/RNA Molecule: Synthetic oligonucleotide
uccagctttattgggaggcc

SEQ ID NO: 496 - DNA, 20 bp, Artificial Sequence
  Description of Artificial Sequence: Synthetic oligonucleotide
  Description of Combined DNA/RNA Molecule: Synthetic oligonucleotide
cuuguccagctttatuggga

SEQ ID NO: 497 - DNA, 20 bp, Artificial Sequence
  Description of Artificial Sequence: Synthetic oligonucleotide
agcttcttgtccagctttat

SEQ ID NO: 498 - DNA, 21 bp, Artificial Sequence
  Description of Artificial Sequence: Synthetic oligonucleotide
  Description of Combined DNA/RNA Molecule: Synthetic oligonucleotide
tccagcuuuauugggaggctu

SEQ ID NO: 499 - DNA, 21 bp, Artificial Sequence
  Description of Artificial Sequence: Synthetic oligonucleotide
  Description of Combined DNA/RNA Molecule: Synthetic oligonucleotide
tcccuggagauugcaggactu

SEQ ID NO: 500 - DNA, 21 bp, Artificial Sequence
  Description of Artificial Sequence: Synthetic oligonucleotide
  Description of Combined DNA/RNA Molecule: Synthetic oligonucleotide
tcuggagauugcaggaccctu

SEQ ID NO: 501 - DNA, 21 bp, Artificial Sequence
  Description of Artificial Sequence: Synthetic oligonucleotide
  Description of Combined DNA/RNA Molecule: Synthetic oligonucleotide
tgaggucucaggcagccactu

SEQ ID NO: 502 - DNA, 21 bp, Artificial Sequence
  Description of Artificial Sequence: Synthetic oligonucleotide
  Description of Combined DNA/RNA Molecule: Synthetic oligonucleotide
taggucucaggcagccacgtu

SEQ ID NO: 503 - DNA, 21 bp, Artificial Sequence
  Description of Artificial Sequence: Synthetic oligonucleotide
  Description of Combined DNA/RNA Molecule: Synthetic oligonucleotide
tggucucaggcagccacggtu

SEQ ID NO: 504 - DNA, 21 bp, Artificial Sequence
  Description of Artificial Sequence: Synthetic oligonucleotide
  Description of Combined DNA/RNA Molecule: Synthetic oligonucleotide
tucucaggcagccacggcutu

SEQ ID NO: 505 - DNA, 21 bp, Artificial Sequence
  Description of Artificial Sequence: Synthetic oligonucleotide
  Description of Combined DNA/RNA Molecule: Synthetic oligonucleotide
tccaucggucacccagccctu

SEQ ID NO: 506 - DNA, 21 bp, Artificial Sequence
  Description of Artificial Sequence: Synthetic oligonucleotide
  Description of Combined DNA/RNA Molecule: Synthetic oligonucleotide
tcugggacuccugcacgcutu

SEQ ID NO: 507 - DNA, 21 bp, Artificial Sequence
  Description of Artificial Sequence: Synthetic oligonucleotide
  Description of Combined DNA/RNA Molecule: Synthetic oligonucleotide
tgcucagugcauccuuggctu

SEQ ID NO: 508 - DNA, 21 bp, Artificial Sequence
  Description of Artificial Sequence: Synthetic oligonucleotide
  Description of Combined DNA/RNA Molecule: Synthetic oligonucleotide
tgcauccuuggcggucuugtu

SEQ ID NO: 509 - DNA, 21 bp, Artificial Sequence
  Description of Artificial Sequence: Synthetic oligonucleotide
  Description of Combined DNA/RNA Molecule: Synthetic oligonucleotide
tccagcuuuauugggaggctu

SEQ ID NO: 510 - DNA, 21 bp, Artificial Sequence
  Description of Artificial Sequence: Synthetic oligonucleotide
  Description of Combined DNA/RNA Molecule: Synthetic oligonucleotide
tcccuggagauugcaggactu

SEQ ID NO: 511 - DNA, 21 bp, Artificial Sequence
  Description of Artificial Sequence: Synthetic oligonucleotide
  Description of Combined DNA/RNA Molecule: Synthetic oligonucleotide
tcuggagauugcaggaccctu

SEQ ID NO: 512 - DNA, 21 bp, Artificial Sequence
  Description of Artificial Sequence: Synthetic oligonucleotide
  Description of Combined DNA/RNA Molecule: Synthetic oligonucleotide
tgaggucucaggcagccactu

SEQ ID NO: 513 - DNA, 21 bp, Artificial Sequence
  Description of Artificial Sequence: Synthetic oligonucleotide
  Description of Combined DNA/RNA Molecule: Synthetic oligonucleotide
taggucucaggcagccacgtu

SEQ ID NO: 514 - DNA, 21 bp, Artificial Sequence
  Description of Artificial Sequence: Synthetic oligonucleotide
  Description of Combined DNA/RNA Molecule: Synthetic oligonucleotide
tggucucaggcagccacggtu

SEQ ID NO: 515 - DNA, 21 bp, Artificial Sequence
  Description of Artificial Sequence: Synthetic oligonucleotide
  Description of Combined DNA/RNA Molecule: Synthetic oligonucleotide
tucucaggcagccacggcutu

SEQ ID NO: 516 - DNA, 21 bp, Artificial Sequence
  Description of Artificial Sequence: Synthetic oligonucleotide
  Description of Combined DNA/RNA Molecule: Synthetic oligonucleotide
tccaucggucacccagccctu

SEQ ID NO: 517 - DNA, 21 bp, Artificial Sequence
  Description of Artificial Sequence: Synthetic oligonucleotide
  Description of Combined DNA/RNA Molecule: Synthetic oligonucleotide
tcugggacuccugcacgcutu

SEQ ID NO: 518 - DNA, 21 bp, Artificial Sequence
  Description of Artificial Sequence: Synthetic oligonucleotide
  Description of Combined DNA/RNA Molecule: Synthetic oligonucleotide
tgcucagugcauccuuggctu

SEQ ID NO: 519 - DNA, 21 bp, Artificial Sequence
  Description of Artificial Sequence: Synthetic oligonucleotide
  Description of Combined DNA/RNA Molecule: Synthetic oligonucleotide
tgcauccuuggcggucuugtu

SEQ ID NO: 520 - DNA, 21 bp, Artificial Sequence
  Description of Artificial Sequence: Synthetic oligonucleotide
  Description of Combined DNA/RNA Molecule: Synthetic oligonucleotide
tguccagcuuuauugggagtu

SEQ ID NO: 521 - DNA, 21 bp, Artificial Sequence
  Description of Artificial Sequence: Synthetic oligonucleotide
  Description of Combined DNA/RNA Molecule: Synthetic oligonucleotide
tccagcuuuauugggaggctu

SEQ ID NO: 522 - DNA, 21 bp, Artificial Sequence
  Description of Artificial Sequence: Synthetic oligonucleotide
  Description of Combined DNA/RNA Molecule: Synthetic oligonucleotide
tcccuggagauugcaggactu

SEQ ID NO: 523 - DNA, 21 bp, Artificial Sequence
  Description of Artificial Sequence: Synthetic oligonucleotide
  Description of Combined DNA/RNA Molecule: Synthetic oligonucleotide
tcuggagauugcaggaccctu

SEQ ID NO: 524 - DNA, 21 bp, Artificial Sequence
  Description of Artificial Sequence: Synthetic oligonucleotide
  Description of Combined DNA/RNA Molecule: Synthetic oligonucleotide
tgaggucucaggcagccactu

SEQ ID NO: 525 - DNA, 21 bp, Artificial Sequence
  Description of Artificial Sequence: Synthetic oligonucleotide
  Description of Combined DNA/RNA Molecule: Synthetic oligonucleotide
taggucucaggcagccacgtu

SEQ ID NO: 526 - DNA, 21 bp, Artificial Sequence
  Description of Artificial Sequence: Synthetic oligonucleotide
  Description of Combined DNA/RNA Molecule: Synthetic oligonucleotide
tggucucaggcagccacggtu

SEQ ID NO: 527 - DNA, 21 bp, Artificial Sequence
  Description of Artificial Sequence: Synthetic oligonucleotide
  Description of Combined DNA/RNA Molecule: Synthetic oligonucleotide
tucucaggcagccacggcutu

SEQ ID NO: 528 - DNA, 21 bp, Artificial Sequence
  Description of Artificial Sequence: Synthetic oligonucleotide
  Description of Combined DNA/RNA Molecule: Synthetic oligonucleotide
tccaucggucacccagccctu

SEQ ID NO: 529 - DNA, 21 bp, Artificial Sequence
  Description of Artificial Sequence: Synthetic oligonucleotide
  Description of Combined DNA/RNA Molecule: Synthetic oligonucleotide
tcugggacuccugcacgcutu

SEQ ID NO: 530 - DNA, 21 bp, Artificial Sequence
  Description of Artificial Sequence: Synthetic oligonucleotide
  Description of Combined DNA/RNA Molecule: Synthetic oligonucleotide
tgcucagugcauccuuggctu

SEQ ID NO: 531 - DNA, 21 bp, Artificial Sequence
  Description of Artificial Sequence: Synthetic oligonucleotide
  Description of Combined DNA/RNA Molecule: Synthetic oligonucleotide
tgcauccuuggcggucuugtu

SEQ ID NO: 532 - DNA, 21 bp, Artificial Sequence
  Description of Artificial Sequence: Synthetic oligonucleotide
  Description of Combined DNA/RNA Molecule: Synthetic oligonucleotide
tccagcuuuauugggaggctu

SEQ ID NO: 533 - DNA, 21 bp, Artificial Sequence
  Description of Artificial Sequence: Synthetic oligonucleotide
  Description of Combined DNA/RNA Molecule: Synthetic oligonucleotide
tcccuggagauugcaggactu

SEQ ID NO: 534 - DNA, 21 bp, Artificial Sequence
  Description of Artificial Sequence: Synthetic oligonucleotide
  Description of Combined DNA/RNA Molecule: Synthetic oligonucleotide
tcuggagauugcaggaccctu

SEQ ID NO: 535 - DNA, 21 bp, Artificial Sequence
  Description of Artificial Sequence: Synthetic oligonucleotide
  Description of Combined DNA/RNA Molecule: Synthetic oligonucleotide
tgaggucucaggcagccactu

SEQ ID NO: 536 - DNA, 21 bp, Artificial Sequence
  Description of Artificial Sequence: Synthetic oligonucleotide
  Description of Combined DNA/RNA Molecule: Synthetic oligonucleotide
taggucucaggcagccacgtu

SEQ ID NO: 537 - DNA, 21 bp, Artificial Sequence
  Description of Artificial Sequence: Synthetic oligonucleotide
  Description of Combined DNA/RNA Molecule: Synthetic oligonucleotide
tucucaggcagccacggcutu

SEQ ID NO: 538 - DNA, 21 bp, Artificial Sequence
  Description of Artificial Sequence: Synthetic oligonucleotide
  Description of Combined DNA/RNA Molecule: Synthetic oligonucleotide
tccaucggucacccagccctu

SEQ ID NO: 539 - DNA, 21 bp, Artificial Sequence
  Description of Artificial Sequence: Synthetic oligonucleotide
  Description of Combined DNA/RNA Molecule: Synthetic oligonucleotide
tcugggacuccugcacgcutu

SEQ ID NO: 540 - DNA, 21 bp, Artificial Sequence
  Description of Artificial Sequence: Synthetic oligonucleotide
  Description of Combined DNA/RNA Molecule: Synthetic oligonucleotide
tgcucagugcauccuuggctu

SEQ ID NO: 541 - DNA, 21 bp, Artificial Sequence
  Description of Artificial Sequence: Synthetic oligonucleotide
  Description of Combined DNA/RNA Molecule: Synthetic oligonucleotide
tgcauccuuggcggucuugtu

SEQ ID NO: 542 - DNA, 21 bp, Artificial Sequence
  Description of Artificial Sequence: Synthetic oligonucleotide
tcactgagaatactgtcccaa

SEQ ID NO: 543 - DNA, 21 bp, Artificial Sequence
  Description of Artificial Sequence: Synthetic oligonucleotide
tcactgagaatactgtcccaa

SEQ ID NO: 544 - DNA, 21 bp, Artificial Sequence
  Description of Artificial Sequence: Synthetic oligonucleotide
  Description of Combined DNA/RNA Molecule: Synthetic oligonucleotide
tcacugagaauacuguccctu

SEQ ID NO: 545 - DNA, 21 bp, Artificial Sequence
  Description of Artificial Sequence: Synthetic oligonucleotide
  Description of Combined DNA/RNA Molecule: Synthetic oligonucleotide
tcacugagaauacuguccctu

SEQ ID NO: 546 - DNA, 21 bp, Artificial Sequence
  Description of Artificial Sequence: Synthetic oligonucleotide
  Description of Combined DNA/RNA Molecule: Synthetic oligonucleotide
tcacugagaauacuguccctu

SEQ ID NO: 547 - DNA, 21 bp, Artificial Sequence
  Description of Artificial Sequence: Synthetic oligonucleotide
  Description of Combined DNA/RNA Molecule: Synthetic oligonucleotide
tcacugagaauacuguccctu

SEQ ID NO: 548 - DNA, 21 bp, Artificial Sequence
  Description of Artificial Sequence: Synthetic oligonucleotide
  Description of Combined DNA/RNA Molecule: Synthetic oligonucleotide
tcacugagaauacuguccctu

SEQ ID NO: 549 - DNA, 21 bp, Artificial Sequence
  Description of Artificial Sequence: Synthetic oligonucleotide
  Description of Combined DNA/RNA Molecule: Synthetic oligonucleotide
tcacugagaauacuguccctu

SEQ ID NO: 550 - DNA, 20 bp, Artificial Sequence
  Description of Artificial Sequence: Synthetic oligonucleotide
  Description of Combined DNA/RNA Molecule: Synthetic oligonucleotide
gcauccttggcggtcuuggu

SEQ ID NO: 551 - DNA, 20 bp, Artificial Sequence
  Description of Artificial Sequence: Synthetic oligonucleotide
  Description of Combined DNA/RNA Molecule: Synthetic oligonucleotide
ugcucagtgcatcctuggcg

SEQ ID NO: 552 - DNA, 20 bp, Artificial Sequence
  Description of Artificial Sequence: Synthetic oligonucleotide
  Description of Combined DNA/RNA Molecule: Synthetic oligonucleotide
ccugggactcctgcacgcug

SEQ ID NO: 553 - DNA, 20 bp, Artificial Sequence
  Description of Artificial Sequence: Synthetic oligonucleotide
  Description of Combined DNA/RNA Molecule: Synthetic oligonucleotide
cugcugggccacctgggacu

SEQ ID NO: 554 - DNA, 20 bp, Artificial Sequence
  Description of Artificial Sequence: Synthetic oligonucleotide
  Description of Combined DNA/RNA Molecule: Synthetic oligonucleotide
gccaucggtcacccagcccc

SEQ ID NO: 555 - DNA, 20 bp, Artificial Sequence
  Description of Artificial Sequence: Synthetic oligonucleotide
  Description of Combined DNA/RNA Molecule: Synthetic oligonucleotide
ugaagccatcggtcacccag

SEQ ID NO: 556 - DNA, 20 bp, Artificial Sequence
  Description of Artificial Sequence: Synthetic oligonucleotide
  Description of Combined DNA/RNA Molecule: Synthetic oligonucleotide
cuuguccttaacggtgcucc

SEQ ID NO: 557 - DNA, 20 bp, Artificial Sequence
  Description of Artificial Sequence: Synthetic oligonucleotide
  Description of Combined DNA/RNA Molecule: Synthetic oligonucleotide
agguctcaggcagccacggc

SEQ ID NO: 558 - DNA, 20 bp, Artificial Sequence
  Description of Artificial Sequence: Synthetic oligonucleotide
  Description of Combined DNA/RNA Molecule: Synthetic oligonucleotide
ugaggtctcaggcagccacg

SEQ ID NO: 559 - DNA, 20 bp, Artificial Sequence
  Description of Artificial Sequence: Synthetic oligonucleotide
  Description of Combined DNA/RNA Molecule: Synthetic oligonucleotide
ccuggagattgcaggaccca

SEQ ID NO: 560 - DNA, 20 bp, Artificial Sequence
  Description of Artificial Sequence: Synthetic oligonucleotide
  Description of Combined DNA/RNA Molecule: Synthetic oligonucleotide
uccagctttattgggaggcc

SEQ ID NO: 561 - DNA, 20 bp, Artificial Sequence
  Description of Artificial Sequence: Synthetic oligonucleotide
  Description of Combined DNA/RNA Molecule: Synthetic oligonucleotide
cuuguccagctttatuggga

SEQ ID NO: 562 - DNA, 20 bp, Artificial Sequence
  Description of Artificial Sequence: Synthetic oligonucleotide
  Description of Combined DNA/RNA Molecule: Synthetic oligonucleotide
gcauccttggcggtcuuggu

SEQ ID NO: 563 - DNA, 20 bp, Artificial Sequence
  Description of Artificial Sequence: Synthetic oligonucleotide
  Description of Combined DNA/RNA Molecule: Synthetic oligonucleotide
ugcucagtgcatcctuggcg

SEQ ID NO: 564 - DNA, 20 bp, Artificial Sequence
  Description of Artificial Sequence: Synthetic oligonucleotide
  Description of Combined DNA/RNA Molecule: Synthetic oligonucleotide
ccugggactcctgcacgcug

SEQ ID NO: 565 - DNA, 20 bp, Artificial Sequence
  Description of Artificial Sequence: Synthetic oligonucleotide
  Description of Combined DNA/RNA Molecule: Synthetic oligonucleotide
cugcugggccacctgggacu

SEQ ID NO: 566 - DNA, 20 bp, Artificial Sequence
  Description of Artificial Sequence: Synthetic oligonucleotide
  Description of Combined DNA/RNA Molecule: Synthetic oligonucleotide
gccaucggtcacccagcccc

SEQ ID NO: 567 - DNA, 20 bp, Artificial Sequence
  Description of Artificial Sequence: Synthetic oligonucleotide
  Description of Combined DNA/RNA Molecule: Synthetic oligonucleotide
ugaagccatcggtcacccag

SEQ ID NO: 568 - DNA, 20 bp, Artificial Sequence
  Description of Artificial Sequence: Synthetic oligonucleotide
  Description of Combined DNA/RNA Molecule: Synthetic oligonucleotide
cuuguccttaacggtgcucc

SEQ ID NO: 569 - DNA, 20 bp, Artificial Sequence
  Description of Artificial Sequence: Synthetic oligonucleotide
  Description of Combined DNA/RNA Molecule: Synthetic oligonucleotide
agguctcaggcagccacggc

SEQ ID NO: 570 - DNA, 20 bp, Artificial Sequence
  Description of Artificial Sequence: Synthetic oligonucleotide
  Description of Combined DNA/RNA Molecule: Synthetic oligonucleotide
ugaggtctcaggcagccacg

SEQ ID NO: 571 - DNA, 20 bp, Artificial Sequence
  Description of Artificial Sequence: Synthetic oligonucleotide
  Description of Combined DNA/RNA Molecule: Synthetic oligonucleotide
ccuggagattgcaggaccca

SEQ ID NO: 572 - DNA, 20 bp, Artificial Sequence
  Description of Artificial Sequence: Synthetic oligonucleotide
  Description of Combined DNA/RNA Molecule: Synthetic oligonucleotide
uccagctttattgggaggcc

SEQ ID NO: 573 - DNA, 20 bp, Artificial Sequence
  Description of Artificial Sequence: Synthetic oligonucleotide
  Description of Combined DNA/RNA Molecule: Synthetic oligonucleotide
cuuguccagctttatuggga

SEQ ID NO: 574 - DNA, 20 bp, Artificial Sequence
  Description of Artificial Sequence: Synthetic oligonucleotide
  Description of Combined DNA/RNA Molecule: Synthetic oligonucleotide
auagcagcttcttgtccagc

SEQ ID NO: 575 - DNA, 20 bp, Artificial Sequence
  Description of Artificial Sequence: Synthetic oligonucleotide
  Description of Combined DNA/RNA Molecule: Synthetic oligonucleotide
auagcagcttcttgtccagc

SEQ ID NO: 576 - DNA, 30 bp, Artificial Sequence
  Description of Artificial Sequence: Synthetic oligonucleotide
caccaagaccgccaaggatgcactgagcag

SEQ ID NO: 577 - RNA, 29 nt, Artificial Sequence
  Description of Artificial Sequence: Synthetic oligonucleotide
gcacugagcagcgugcaggagucccaggu

SEQ ID NO: 578 - RNA, 26 nt, Artificial Sequence
  Description of Artificial Sequence: Synthetic oligonucleotide
gcaggagucccagguggcccagcagg

SEQ ID NO: 579 - RNA, 30 nt, Artificial Sequence
  Description of Artificial Sequence: Synthetic oligonucleotide
ggccaggggcugggugaccgauggcuucag

SEQ ID NO: 580 - RNA, 22 nt, Artificial Sequence
  Description of Artificial Sequence: Synthetic oligonucleotide
uggagcaccguuaaggacaagu

SEQ ID NO: 581 - RNA, 26 nt, Artificial Sequence
  Description of Artificial Sequence: Synthetic oligonucleotide
ucagccguggcugccugagaccucaa

SEQ ID NO: 582 - RNA, 24 nt, Artificial Sequence
  Description of Artificial Sequence: Synthetic oligonucleotide
uuggguccugcaaucuccagggcu

SEQ ID NO: 583 - RNA, 27 nt, Artificial Sequence
  Description of Artificial Sequence: Synthetic oligonucleotide
uggccucccaauaaagcuggacaagaa

SEQ ID NO: 584 - RNA, 26 nt, Artificial Sequence
  Description of Artificial Sequence: Synthetic oligonucleotide
aauaaagcuggacaagaagcugcuau

SEQ ID NO: 585 - DNA, 20 bp, Artificial Sequence
  Description of Artificial Sequence: Synthetic oligonucleotide
tgtccagctttattgggagg

SEQ ID NO: 586 - DNA, 20 bp, Artificial Sequence
  Description of Artificial Sequence: Synthetic oligonucleotide
agcttcttgtccagctttat

SEQ ID NO: 587 - DNA, 20 bp, Artificial Sequence
  Description of Artificial Sequence: Synthetic oligonucleotide
tgtccagctttattgggagg

SEQ ID NO: 588 - DNA, 20 bp, Artificial Sequence
  Description of Artificial Sequence: Synthetic oligonucleotide
agcttcttgtccagctttat

SEQ ID NO: 589 - DNA, 21 bp, Artificial Sequence
  Description of Artificial Sequence: Synthetic oligonucleotide
  Description of Combined DNA/RNA Molecule: Synthetic oligonucleotide
tguccagcuuuauugggagtu

SEQ ID NO: 590 - DNA, 21 bp, Artificial Sequence
  Description of Artificial Sequence: Synthetic oligonucleotide
  Description of Combined DNA/RNA Molecule: Synthetic oligonucleotide
tguccagcuuuauugggagtu

SEQ ID NO: 591 - DNA, 21 bp, Artificial Sequence
  Description of Artificial Sequence: Synthetic oligonucleotide
  Description of Combined DNA/RNA Molecule: Synthetic oligonucleotide
tguccagcuuuauugggagtu

SEQ ID NO: 592 - DNA, 21 bp, Artificial Sequence
  Description of Artificial Sequence: Synthetic oligonucleotide
  Description of Combined DNA/RNA Molecule: Synthetic oligonucleotide
tguccagcuuuauugggagtu

SEQ ID NO: 593 - DNA, 21 bp, Artificial Sequence
  Description of Artificial Sequence: Synthetic oligonucleotide
  Description of Combined DNA/RNA Molecule: Synthetic oligonucleotide
tguccagcuuuauugggagtu

SEQ ID NO: 594 - DNA, 21 bp, Artificial Sequence
  Description of Artificial Sequence: Synthetic oligonucleotide
  Description of Combined DNA/RNA Molecule: Synthetic oligonucleotide
tguccagcuuuauugggagtu

SEQ ID NO: 595 - RNA, 30 nt, Artificial Sequence
  Description of Artificial Sequence: Synthetic oligonucleotide
caccaagaccgccaaggaugcacugagcag

SEQ ID NO: 596 - DNA, 21 bp, Artificial Sequence
  Description of Artificial Sequence: Synthetic oligonucleotide
  Description of Combined DNA/RNA Molecule: Synthetic oligonucleotide
tcauccuuggcggucuuggtu

SEQ ID NO: 597 - DNA, 21 bp, Artificial Sequence
  Description of Artificial Sequence: Synthetic oligonucleotide
  Description of Combined DNA/RNA Molecule: Synthetic oligonucleotide
tugcugggccaccugggactu

SEQ ID NO: 598 - DNA, 21 bp, Artificial Sequence
  Description of Artificial Sequence: Synthetic oligonucleotide
  Description of Combined DNA/RNA Molecule: Synthetic oligonucleotide
tgaagccaucggucacccatu

SEQ ID NO: 599 - DNA, 21 bp, Artificial Sequence
  Description of Artificial Sequence: Synthetic oligonucleotide
  Description of Combined DNA/RNA Molecule: Synthetic oligonucleotide
tuuguccuuaacggugcuctu

SEQ ID NO: 600 - DNA, 21 bp, Artificial Sequence
  Description of Artificial Sequence: Synthetic oligonucleotide
  Description of Combined DNA/RNA Molecule: Synthetic oligonucleotide
tuuguccagcuuuauugggtu

SEQ ID NO: 601 - DNA, 21 bp, Artificial Sequence
  Description of Artificial Sequence: Synthetic oligonucleotide
  Description of Combined DNA/RNA Molecule: Synthetic oligonucleotide
tcauccuuggcggucuuggtu

SEQ ID NO: 602 - DNA, 21 bp, Artificial Sequence
  Description of Artificial Sequence: Synthetic oligonucleotide
  Description of Combined DNA/RNA Molecule: Synthetic oligonucleotide
tugcugggccaccugggactu

SEQ ID NO: 603 - DNA, 21 bp, Artificial Sequence
  Description of Artificial Sequence: Synthetic oligonucleotide
  Description of Combined DNA/RNA Molecule: Synthetic oligonucleotide
tgaagccaucggucacccatu

SEQ ID NO: 604 - DNA, 21 bp, Artificial Sequence
  Description of Artificial Sequence: Synthetic oligonucleotide
  Description of Combined DNA/RNA Molecule: Synthetic oligonucleotide
tuuguccuuaacggugcuctu

SEQ ID NO: 605 - DNA, 21 bp, Artificial Sequence
  Description of Artificial Sequence: Synthetic oligonucleotide
  Description of Combined DNA/RNA Molecule: Synthetic oligonucleotide
tuuguccagcuuuauugggtu

SEQ ID NO: 606 - DNA, 21 bp, Artificial Sequence
  Description of Artificial Sequence: Synthetic oligonucleotide
  Description of Combined DNA/RNA Molecule: Synthetic oligonucleotide
tcauccuuggcggucuuggtu

SEQ ID NO: 607 - DNA, 21 bp, Artificial Sequence
  Description of Artificial Sequence: Synthetic oligonucleotide
  Description of Combined DNA/RNA Molecule: Synthetic oligonucleotide
tugcugggccaccugggactu

SEQ ID NO: 608 - DNA, 21 bp, Artificial Sequence
  Description of Artificial Sequence: Synthetic oligonucleotide
  Description of Combined DNA/RNA Molecule: Synthetic oligonucleotide
tgaagccaucggucacccatu

SEQ ID NO: 609 - DNA, 21 bp, Artificial Sequence
  Description of Artificial Sequence: Synthetic oligonucleotide
  Description of Combined DNA/RNA Molecule: Synthetic oligonucleotide
tuuguccuuaacggugcuctu

SEQ ID NO: 610 - DNA, 21 bp, Artificial Sequence
  Description of Artificial Sequence: Synthetic oligonucleotide
  Description of Combined DNA/RNA Molecule: Synthetic oligonucleotide
tuuguccagcuuuauugggtu

SEQ ID NO: 611 - DNA, 21 bp, Artificial Sequence
  Description of Artificial Sequence: Synthetic oligonucleotide
  Description of Combined DNA/RNA Molecule: Synthetic oligonucleotide
tcauccuuggcggucuuggtu

SEQ ID NO: 612 - DNA, 21 bp, Artificial Sequence
  Description of Artificial Sequence: Synthetic oligonucleotide
  Description of Combined DNA/RNA Molecule: Synthetic oligonucleotide
tugcugggccaccugggactu

SEQ ID NO: 613 - DNA, 21 bp, Artificial Sequence
  Description of Artificial Sequence: Synthetic oligonucleotide
  Description of Combined DNA/RNA Molecule: Synthetic oligonucleotide
tgaagccaucggucacccatu

SEQ ID NO: 614 - DNA, 21 bp, Artificial Sequence
  Description of Artificial Sequence: Synthetic oligonucleotide
  Description of Combined DNA/RNA Molecule: Synthetic oligonucleotide
tuuguccuuaacggugcuctu

SEQ ID NO: 615 - DNA, 21 bp, Artificial Sequence
  Description of Artificial Sequence: Synthetic oligonucleotide
  Description of Combined DNA/RNA Molecule: Synthetic oligonucleotide
tguccagcuuuauugggagtu

SEQ ID NO: 616 - DNA, 21 bp, Artificial Sequence
  Description of Artificial Sequence: Synthetic oligonucleotide
  Description of Combined DNA/RNA Molecule: Synthetic oligonucleotide
tagcuucuuguccagcuuutu

SEQ ID NO: 617 - DNA, 23 bp, Artificial Sequence
  Description of Artificial Sequence: Synthetic oligonucleotide
  Description of Combined DNA/RNA Molecule: Synthetic oligonucleotide
tguccagcuuuauugggaggctu

SEQ ID NO: 618 - DNA, 23 bp, Artificial Sequence
  Description of Artificial Sequence: Synthetic oligonucleotide
  Description of Combined DNA/RNA Molecule: Synthetic oligonucleotide
tagcuucuuguccagcuuuautu

SEQ ID NO: 619 - DNA, 21 bp, Artificial Sequence
  Description of Artificial Sequence: Synthetic oligonucleotide
  Description of Combined DNA/RNA Molecule: Synthetic oligonucleotide
tguccagcuuuauugggagtu

SEQ ID NO: 620 - DNA, 21 bp, Artificial Sequence
  Description of Artificial Sequence: Synthetic oligonucleotide
  Description of Combined DNA/RNA Molecule: Synthetic oligonucleotide
tagcuucuuguccagcuuutu

SEQ ID NO: 621 - DNA, 23 bp, Artificial Sequence
  Description of Artificial Sequence: Synthetic oligonucleotide
  Description of Combined DNA/RNA Molecule: Synthetic oligonucleotide
tguccagcuuuauugggaggctu

SEQ ID NO: 622 - DNA, 23 bp, Artificial Sequence
  Description of Artificial Sequence: Synthetic oligonucleotide
  Description of Combined DNA/RNA Molecule: Synthetic oligonucleotide
tagcuucuuguccagcuuuautu

SEQ ID NO: 623 - DNA, 21 bp, Artificial Sequence
  Description of Artificial Sequence: Synthetic oligonucleotide
  Description of Combined DNA/RNA Molecule: Synthetic oligonucleotide
tguccagcuuuauugggagtu

SEQ ID NO: 624 - DNA, 21 bp, Artificial Sequence
  Description of Artificial Sequence: Synthetic oligonucleotide
  Description of Combined DNA/RNA Molecule: Synthetic oligonucleotide
tagcuucuuguccagcuuutu

SEQ ID NO: 625 - DNA, 23 bp, Artificial Sequence
  Description of Artificial Sequence: Synthetic oligonucleotide
  Description of Combined DNA/RNA Molecule: Synthetic oligonucleotide
tguccagcuuuauugggaggctu

SEQ ID NO: 626 - DNA, 23 bp, Artificial Sequence
  Description of Artificial Sequence: Synthetic oligonucleotide
  Description of Combined DNA/RNA Molecule: Synthetic oligonucleotide
tagcuucuuguccagcuuuautu

SEQ ID NO: 627 - DNA, 20 bp, Artificial Sequence
  Description of Artificial Sequence: Synthetic oligonucleotide
  Description of Combined DNA/RNA Molecule: Synthetic oligonucleotide
guccagcuuuauugggagtu

SEQ ID NO: 628 - DNA, 20 bp, Artificial Sequence
  Description of Artificial Sequence: Synthetic oligonucleotide
  Description of Combined DNA/RNA Molecule: Synthetic oligonucleotide
agcuucuuguccagcuuutu

SEQ ID NO: 629 - DNA, 20 bp, Artificial Sequence
  Description of Artificial Sequence: Synthetic oligonucleotide
  Description of Combined DNA/RNA Molecule: Synthetic oligonucleotide
gcauccttggcggtcuuggu

SEQ ID NO: 630 - DNA, 20 bp, Artificial Sequence
  Description of Artificial Sequence: Synthetic oligonucleotide
  Description of Combined DNA/RNA Molecule: Synthetic oligonucleotide
ugcucagtgcatcctuggcg

SEQ ID NO: 631 - DNA, 20 bp, Artificial Sequence
  Description of Artificial Sequence: Synthetic oligonucleotide
  Description of Combined DNA/RNA Molecule: Synthetic oligonucleotide
ccugggactcctgcacgcug

SEQ ID NO: 632 - DNA, 20 bp, Artificial Sequence
  Description of Artificial Sequence: Synthetic oligonucleotide
  Description of Combined DNA/RNA Molecule: Synthetic oligonucleotide
cugcugggccacctgggacu

SEQ ID NO: 633 - DNA, 20 bp, Artificial Sequence
  Description of Artificial Sequence: Synthetic oligonucleotide
  Description of Combined DNA/RNA Molecule: Synthetic oligonucleotide
gccaucggtcacccagcccc

SEQ ID NO: 634 - DNA, 20 bp, Artificial Sequence
  Description of Artificial Sequence: Synthetic oligonucleotide
  Description of Combined DNA/RNA Molecule: Synthetic oligonucleotide
ugaagccatcggtcacccag

SEQ ID NO: 635 - DNA, 20 bp, Artificial Sequence
  Description of Artificial Sequence: Synthetic oligonucleotide
  Description of Combined DNA/RNA Molecule: Synthetic oligonucleotide
cuuguccttaacggtgcucc

SEQ ID NO: 636 - DNA, 20 bp, Artificial Sequence
  Description of Artificial Sequence: Synthetic oligonucleotide
  Description of Combined DNA/RNA Molecule: Synthetic oligonucleotide
agguctcaggcagccacggc

SEQ ID NO: 637 - DNA, 20 bp, Artificial Sequence
  Description of Artificial Sequence: Synthetic oligonucleotide
  Description of Combined DNA/RNA Molecule: Synthetic oligonucleotide
ugaggtctcaggcagccacg

SEQ ID NO: 638 - DNA, 20 bp, Artificial Sequence
  Description of Artificial Sequence: Synthetic oligonucleotide
  Description of Combined DNA/RNA Molecule: Synthetic oligonucleotide
ccuggagattgcaggaccca

SEQ ID NO: 639 - DNA, 20 bp, Artificial Sequence
  Description of Artificial Sequence: Synthetic oligonucleotide
  Description of Combined DNA/RNA Molecule: Synthetic oligonucleotide
uccagctttattgggaggcc

SEQ ID NO: 640 - DNA, 20 bp, Artificial Sequence
  Description of Artificial Sequence: Synthetic oligonucleotide
  Description of Combined DNA/RNA Molecule: Synthetic oligonucleotide
cuuguccagctttatuggga

SEQ ID NO: 641 - DNA, 20 bp, Artificial Sequence
  Description of Artificial Sequence: Synthetic oligonucleotide
  Description of Combined DNA/RNA Molecule: Synthetic oligonucleotide
auagcagcttcttgtccagc

SEQ ID NO: 642 - DNA, 20 bp, Artificial Sequence
  Description of Artificial Sequence: Synthetic oligonucleotide
  Description of Combined DNA/RNA Molecule: Synthetic oligonucleotide
auagcagcttcttgtccagc

SEQ ID NO: 643 - DNA, 20 bp, Artificial Sequence
  Description of Artificial Sequence: Synthetic oligonucleotide
agcttcttgtccagctttat

SEQ ID NO: 644 - DNA, 20 bp, Artificial Sequence
  Description of Artificial Sequence: Synthetic oligonucleotide
agcttcttgtccagctttat

SEQ ID NO: 645 - DNA, 20 bp, Artificial Sequence
  Description of Artificial Sequence: Synthetic oligonucleotide
agcttcttgtccagctttat

SEQ ID NO: 646 - DNA, 20 bp, Artificial Sequence
  Description of Artificial Sequence: Synthetic oligonucleotide
  Description of Combined DNA/RNA Molecule: Synthetic oligonucleotide
agcutcttgtccagctuuau

SEQ ID NO: 647 - DNA, 20 bp, Artificial Sequence
  Description of Artificial Sequence: Synthetic oligonucleotide
  Description of Combined DNA/RNA Molecule: Synthetic oligonucleotide
agcutcttgtccagctuuau

SEQ ID NO: 648 - DNA, 20 bp, Artificial Sequence
  Description of Artificial Sequence: Synthetic oligonucleotide
  Description of Combined DNA/RNA Molecule: Synthetic oligonucleotide
agcutcttgtccagctuuau

SEQ ID NO: 649 - DNA, 20 bp, Artificial Sequence
  Description of Artificial Sequence: Synthetic oligonucleotide
  Description of Combined DNA/RNA Molecule: Synthetic oligonucleotide
agcutcttgtccagctuuau

SEQ ID NO: 650 - DNA, 20 bp, Artificial Sequence
  Description of Artificial Sequence: Synthetic oligonucleotide
  Description of Combined DNA/RNA Molecule: Synthetic oligonucleotide
uguccagctttattgggagg

SEQ ID NO: 651 - DNA, 20 bp, Artificial Sequence
  Description of Artificial Sequence: Synthetic oligonucleotide
  Description of Combined DNA/RNA Molecule: Synthetic oligonucleotide
uguccagctttattgggagg

SEQ ID NO: 652 - DNA, 20 bp, Artificial Sequence
  Description of Artificial Sequence: Synthetic oligonucleotide
agcttcttgtccagctttat

SEQ ID NO: 653 - DNA, 20 bp, Artificial Sequence
  Description of Artificial Sequence: Synthetic oligonucleotide
agcttcttgtccagctttat

SEQ ID NO: 654 - DNA, 20 bp, Artificial Sequence
  Description of Artificial Sequence: Synthetic oligonucleotide
agcttcttgtccagctttat

SEQ ID NO: 655 - DNA, 20 bp, Artificial Sequence
  Description of Artificial Sequence: Synthetic oligonucleotide
  Description of Combined DNA/RNA Molecule: Synthetic oligonucleotide
agcutcttgtccagctuuau

SEQ ID NO: 656 - DNA, 20 bp, Artificial Sequence
  Description of Artificial Sequence: Synthetic oligonucleotide
  Description of Combined DNA/RNA Molecule: Synthetic oligonucleotide
agcutcttgtccagctuuau

SEQ ID NO: 657 - DNA, 20 bp, Artificial Sequence
  Description of Artificial Sequence: Synthetic oligonucleotide
  Description of Combined DNA/RNA Molecule: Synthetic oligonucleotide
agcutcttgtccagctuuau

SEQ ID NO: 658 - DNA, 20 bp, Artificial Sequence
  Description of Artificial Sequence: Synthetic oligonucleotide
  Description of Combined DNA/RNA Molecule: Synthetic oligonucleotide
agcutcttgtccagctuuau

SEQ ID NO: 659 - DNA, 20 bp, Artificial Sequence
  Description of Artificial Sequence: Synthetic oligonucleotide
  Description of Combined DNA/RNA Molecule: Synthetic oligonucleotide
uguccagctttattgggagg

SEQ ID NO: 660 - DNA, 20 bp, Artificial Sequence
  Description of Artificial Sequence: Synthetic oligonucleotide
  Description of Combined DNA/RNA Molecule: Synthetic oligonucleotide
uguccagctttattgggagg

SEQ ID NO: 661 - DNA, 20 bp, Artificial Sequence
  Description of Artificial Sequence: Synthetic oligonucleotide
agcttcttgtccagctttat

SEQ ID NO: 662 - DNA, 20 bp, Artificial Sequence
  Description of Artificial Sequence: Synthetic oligonucleotide
agcttcttgtccagctttat

SEQ ID NO: 663 - DNA, 20 bp, Artificial Sequence
  Description of Artificial Sequence: Synthetic oligonucleotide
agcttcttgtccagctttat

SEQ ID NO: 664 - DNA, 20 bp, Artificial Sequence
  Description of Artificial Sequence: Synthetic oligonucleotide
  Description of Combined DNA/RNA Molecule: Synthetic oligonucleotide
agcutcttgtccagctuuau

SEQ ID NO: 665 - DNA, 20 bp, Artificial Sequence
  Description of Artificial Sequence: Synthetic oligonucleotide
  Description of Combined DNA/RNA Molecule: Synthetic oligonucleotide
agcutcttgtccagctuuau

SEQ ID NO: 666 - DNA, 20 bp, Artificial Sequence
  Description of Artificial Sequence: Synthetic oligonucleotide
  Description of Combined DNA/RNA Molecule: Synthetic oligonucleotide
agcutcttgtccagctuuau

SEQ ID NO: 667 - DNA, 20 bp, Artificial Sequence
  Description of Artificial Sequence: Synthetic oligonucleotide
  Description of Combined DNA/RNA Molecule: Synthetic oligonucleotide
agcutcttgtccagctuuau

SEQ ID NO: 668 - DNA, 20 bp, Artificial Sequence
  Description of Artificial Sequence: Synthetic oligonucleotide
  Description of Combined DNA/RNA Molecule: Synthetic oligonucleotide
uguccagctttattgggagg

SEQ ID NO: 669 - DNA, 20 bp, Artificial Sequence
  Description of Artificial Sequence: Synthetic oligonucleotide
  Description of Combined DNA/RNA Molecule: Synthetic oligonucleotide
uguccagctttattgggagg

SEQ ID NO: 670 - DNA, 21 bp, Artificial Sequence
  Description of Artificial Sequence: Synthetic oligonucleotide
  Description of Combined DNA/RNA Molecule: Synthetic oligonucleotide
tguccagcuuuauugggagtu

SEQ ID NO: 671 - DNA, 21 bp, Artificial Sequence
  Description of Artificial Sequence: Synthetic oligonucleotide
  Description of Combined DNA/RNA Molecule: Synthetic oligonucleotide
tagcuucuuguccagcuuutu

SEQ ID NO: 672 - DNA, 23 bp, Artificial Sequence
  Description of Artificial Sequence: Synthetic oligonucleotide
  Description of Combined DNA/RNA Molecule: Synthetic oligonucleotide
tguccagcuuuauugggaggctu

SEQ ID NO: 673 - DNA, 23 bp, Artificial Sequence
  Description of Artificial Sequence: Synthetic oligonucleotide
  Description of Combined DNA/RNA Molecule: Synthetic oligonucleotide
tagcuucuuguccagcuuuautu

SEQ ID NO: 674 - DNA, 21 bp, Artificial Sequence
  Description of Artificial Sequence: Synthetic oligonucleotide
  Description of Combined DNA/RNA Molecule: Synthetic oligonucleotide
tguccagcuuuauugggagtu

SEQ ID NO: 675 - DNA, 21 bp, Artificial Sequence
  Description of Artificial Sequence: Synthetic oligonucleotide
  Description of Combined DNA/RNA Molecule: Synthetic oligonucleotide
tagcuucuuguccagcuuutu

SEQ ID NO: 676 - DNA, 23 bp, Artificial Sequence
  Description of Artificial Sequence: Synthetic oligonucleotide
  Description of Combined DNA/RNA Molecule: Synthetic oligonucleotide
tguccagcuuuauugggaggctu

SEQ ID NO: 677 - DNA, 23 bp, Artificial Sequence
  Description of Artificial Sequence: Synthetic oligonucleotide
  Description of Combined DNA/RNA Molecule: Synthetic oligonucleotide
tagcuucuuguccagcuuuautu

SEQ ID NO: 678 - DNA, 21 bp, Artificial Sequence
  Description of Artificial Sequence: Synthetic oligonucleotide
  Description of Combined DNA/RNA Molecule: Synthetic oligonucleotide
tguccagcuuuauugggagtu

SEQ ID NO: 679 - DNA, 21 bp, Artificial Sequence
  Description of Artificial Sequence: Synthetic oligonucleotide
  Description of Combined DNA/RNA Molecule: Synthetic oligonucleotide
tagcuucuuguccagcuuutu

SEQ ID NO: 680 - DNA, 23 bp, Artificial Sequence
  Description of Artificial Sequence: Synthetic oligonucleotide
  Description of Combined DNA/RNA Molecule: Synthetic oligonucleotide
tguccagcuuuauugggaggctu

SEQ ID NO: 681 - DNA, 23 bp, Artificial Sequence
  Description of Artificial Sequence: Synthetic oligonucleotide
  Description of Combined DNA/RNA Molecule: Synthetic oligonucleotide
tagcuucuuguccagcuuuautu

SEQ ID NO: 682 - DNA, 21 bp, Artificial Sequence
  Description of Artificial Sequence: Synthetic oligonucleotide
  Description of Combined DNA/RNA Molecule: Synthetic oligonucleotide
tguccagcuuuauugggagtu

SEQ ID NO: 683 - DNA, 21 bp, Artificial Sequence
  Description of Artificial Sequence: Synthetic oligonucleotide
  Description of Combined DNA/RNA Molecule: Synthetic oligonucleotide
tagcuucuuguccagcuuutu

SEQ ID NO: 684 - DNA, 23 bp, Artificial Sequence
  Description of Artificial Sequence: Synthetic oligonucleotide
  Description of Combined DNA/RNA Molecule: Synthetic oligonucleotide
tguccagcuuuauugggaggctu

SEQ ID NO: 685 - DNA, 23 bp, Artificial Sequence
  Description of Artificial Sequence: Synthetic oligonucleotide
  Description of Combined DNA/RNA Molecule: Synthetic oligonucleotide
tagcuucuuguccagcuuuautu

SEQ ID NO: 686 - DNA, 23 bp, Artificial Sequence
  Description of Artificial Sequence: Synthetic oligonucleotide
  Description of Combined DNA/RNA Molecule: Synthetic oligonucleotide
tguccagcuuuauugggaggctu

SEQ ID NO: 687 - DNA, 23 bp, Artificial Sequence
  Description of Artificial Sequence: Synthetic oligonucleotide
  Description of Combined DNA/RNA Molecule: Synthetic oligonucleotide
tguccagcuuuauugggaggctu

SEQ ID NO: 688 - DNA, 23 bp, Artificial Sequence
  Description of Artificial Sequence: Synthetic oligonucleotide
  Description of Combined DNA/RNA Molecule: Synthetic oligonucleotide
tguccagcuuuauugggaggctu

SEQ ID NO: 689 - DNA, 23 bp, Artificial Sequence
  Description of Artificial Sequence: Synthetic oligonucleotide
  Description of Combined DNA/RNA Molecule: Synthetic oligonucleotide
tguccagcuuuauugggaggctu

SEQ ID NO: 690 - DNA, 23 bp, Artificial Sequence
  Description of Artificial Sequence: Synthetic oligonucleotide
  Description of Combined DNA/RNA Molecule: Synthetic oligonucleotide
tguccagcuuuauugggaggctu

SEQ ID NO: 691 - DNA, 23 bp, Artificial Sequence
  Description of Artificial Sequence: Synthetic oligonucleotide
  Description of Combined DNA/RNA Molecule: Synthetic oligonucleotide
tguccagcuuuauugggaggctu

SEQ ID NO: 692 - DNA, 23 bp, Artificial Sequence
  Description of Artificial Sequence: Synthetic oligonucleotide
  Description of Combined DNA/RNA Molecule: Synthetic oligonucleotide
tguccagcuuuauugggaggctu

SEQ ID NO: 693 - DNA, 23 bp, Artificial Sequence
  Description of Artificial Sequence: Synthetic oligonucleotide
  Description of Combined DNA/RNA Molecule: Synthetic oligonucleotide
tguccagcuuuauugggaggctu

SEQ ID NO: 694 - DNA, 23 bp, Artificial Sequence
  Description of Artificial Sequence: Synthetic oligonucleotide
  Description of Combined DNA/RNA Molecule: Synthetic oligonucleotide
tguccagcuuuauugggaggctu

SEQ ID NO: 695 - DNA, 23 bp, Artificial Sequence
  Description of Artificial Sequence: Synthetic oligonucleotide
  Description of Combined DNA/RNA Molecule: Synthetic oligonucleotide
tguccagctuuatugggaggctu

SEQ ID NO: 696 - DNA, 23 bp, Artificial Sequence
  Description of Artificial Sequence: Synthetic oligonucleotide
  Description of Combined DNA/RNA Molecule: Synthetic oligonucleotide
tguccagctuuauugggaggctu

SEQ ID NO: 697 - DNA, 23 bp, Artificial Sequence
  Description of Artificial Sequence: Synthetic oligonucleotide
  Description of Combined DNA/RNA Molecule: Synthetic oligonucleotide
tguccagcuuuatugggaggctu

SEQ ID NO: 698 - DNA, 23 bp, Artificial Sequence
  Description of Artificial Sequence: Synthetic oligonucleotide
  Description of Combined DNA/RNA Molecule: Synthetic oligonucleotide
tguccagctuuatugggaggctu

SEQ ID NO: 699 - DNA, 23 bp, Artificial Sequence
  Description of Artificial Sequence: Synthetic oligonucleotide
  Description of Combined DNA/RNA Molecule: Synthetic oligonucleotide
tagcuucuuguccagcuuuautu

SEQ ID NO: 700 - DNA, 23 bp, Artificial Sequence
  Description of Artificial Sequence: Synthetic oligonucleotide
  Description of Combined DNA/RNA Molecule: Synthetic oligonucleotide
tagcuucuuguccagcuuuautu

SEQ ID NO: 701 - DNA, 23 bp, Artificial Sequence
  Description of Artificial Sequence: Synthetic oligonucleotide
  Description of Combined DNA/RNA Molecule: Synthetic oligonucleotide
tagcuucuuguccagcuuuautu

SEQ ID NO: 702 - DNA, 23 bp, Artificial Sequence
  Description of Artificial Sequence: Synthetic oligonucleotide
  Description of Combined DNA/RNA Molecule: Synthetic oligonucleotide
tagcuucuuguccagcuuuautu

SEQ ID NO: 703 - DNA, 23 bp, Artificial Sequence
  Description of Artificial Sequence: Synthetic oligonucleotide
  Description of Combined DNA/RNA Molecule: Synthetic oligonucleotide
tagcuucuuguccagcuuuautu

SEQ ID NO: 704 - DNA, 23 bp, Artificial Sequence
  Description of Artificial Sequence: Synthetic oligonucleotide
  Description of Combined DNA/RNA Molecule: Synthetic oligonucleotide
tagcuucuuguccagcuuuautu

SEQ ID NO: 705 - DNA, 23 bp, Artificial Sequence
  Description of Artificial Sequence: Synthetic oligonucleotide
  Description of Combined DNA/RNA Molecule: Synthetic oligonucleotide
tagctucutguccagcuuuautu

SEQ ID NO: 706 - DNA, 23 bp, Artificial Sequence
  Description of Artificial Sequence: Synthetic oligonucleotide
  Description of Combined DNA/RNA Molecule: Synthetic oligonucleotide
tagctucuuguccagcuuuautu

SEQ ID NO: 707 - DNA, 23 bp, Artificial Sequence
  Description of Artificial Sequence: Synthetic oligonucleotide
  Description of Combined DNA/RNA Molecule: Synthetic oligonucleotide
tagcuucuuguccagcuuuautu

SEQ ID NO: 708 - DNA, 23 bp, Artificial Sequence
  Description of Artificial Sequence: Synthetic oligonucleotide
  Description of Combined DNA/RNA Molecule: Synthetic oligonucleotide
tagcuucutguccagcuuuautu

SEQ ID NO: 709 - DNA, 23 bp, Artificial Sequence
  Description of Artificial Sequence: Synthetic oligonucleotide
  Description of Combined DNA/RNA Molecule: Synthetic oligonucleotide
tagctucutguccagcuuuautu

SEQ ID NO: 710 - DNA, 23 bp, Artificial Sequence
  Description of Artificial Sequence: Synthetic oligonucleotide
  Description of Combined DNA/RNA Molecule: Synthetic oligonucleotide
tguccagcuuuauugggaggctu

SEQ ID NO: 711 - DNA, 23 bp, Artificial Sequence
  Description of Artificial Sequence: Synthetic oligonucleotide
  Description of Combined DNA/RNA Molecule: Synthetic oligonucleotide
tguccagcuuuauugggaggctu

SEQ ID NO: 712 - DNA, 23 bp, Artificial Sequence
  Description of Artificial Sequence: Synthetic oligonucleotide
  Description of Combined DNA/RNA Molecule: Synthetic oligonucleotide
tguccagcuuuauugggaggctu

SEQ ID NO: 713 - DNA, 23 bp, Artificial Sequence
  Description of Artificial Sequence: Synthetic oligonucleotide
  Description of Combined DNA/RNA Molecule: Synthetic oligonucleotide
tguccagcuuuauugggaggctu

SEQ ID NO: 714 - DNA, 23 bp, Artificial Sequence
  Description of Artificial Sequence: Synthetic oligonucleotide
  Description of Combined DNA/RNA Molecule: Synthetic oligonucleotide
tguccagcuuuauugggaggctu

SEQ ID NO: 715 - DNA, 23 bp, Artificial Sequence
  Description of Artificial Sequence: Synthetic oligonucleotide
  Description of Combined DNA/RNA Molecule: Synthetic oligonucleotide
tguccagcuuuauugggaggctu

SEQ ID NO: 716 - DNA, 23 bp, Artificial Sequence
  Description of Artificial Sequence: Synthetic oligonucleotide
  Description of Combined DNA/RNA Molecule: Synthetic oligonucleotide
tguccagcuuuauugggaggctu

SEQ ID NO: 717 - DNA, 23 bp, Artificial Sequence
  Description of Artificial Sequence: Synthetic oligonucleotide
  Description of Combined DNA/RNA Molecule: Synthetic oligonucleotide
tguccagcuuuauugggaggctu

SEQ ID NO: 718 - DNA, 23 bp, Artificial Sequence
  Description of Artificial Sequence: Synthetic oligonucleotide
  Description of Combined DNA/RNA Molecule: Synthetic oligonucleotide
tguccagcuuuauugggaggctu

SEQ ID NO: 719 - DNA, 23 bp, Artificial Sequence
  Description of Artificial Sequence: Synthetic oligonucleotide
  Description of Combined DNA/RNA Molecule: Synthetic oligonucleotide
tguccagcuuuauugggaggctc

SEQ ID NO: 720 - DNA, 23 bp, Artificial Sequence
  Description of Artificial Sequence: Synthetic oligonucleotide
  Description of Combined DNA/RNA Molecule: Synthetic oligonucleotide
tguccagcuuuauugggaggcta

SEQ ID NO: 721 - DNA, 23 bp, Artificial Sequence
  Description of Artificial Sequence: Synthetic oligonucleotide
  Description of Combined DNA/RNA Molecule: Synthetic oligonucleotide
tguccagcuuuauugggaggctg

SEQ ID NO: 722 - DNA, 23 bp, Artificial Sequence
  Description of Artificial Sequence: Synthetic oligonucleotide
  Description of Combined DNA/RNA Molecule: Synthetic oligonucleotide
tguccagcuuuauugggaggctu

SEQ ID NO: 723 - DNA, 23 bp, Artificial Sequence
  Description of Artificial Sequence: Synthetic oligonucleotide
  Description of Combined DNA/RNA Molecule: Synthetic oligonucleotide
tguccagcuuuauugggaggctu

SEQ ID NO: 724 - DNA, 23 bp, Artificial Sequence
  Description of Artificial Sequence: Synthetic oligonucleotide
  Description of Combined DNA/RNA Molecule: Synthetic oligonucleotide
tguccagcuuuauugggaggctu

SEQ ID NO: 725 - DNA, 23 bp, Artificial Sequence
  Description of Artificial Sequence: Synthetic oligonucleotide
  Description of Combined DNA/RNA Molecule: Synthetic oligonucleotide
tguccagcuuuauugggaggctu

SEQ ID NO: 726 - DNA, 23 bp, Artificial Sequence
  Description of Artificial Sequence: Synthetic oligonucleotide
  Description of Combined DNA/RNA Molecule: Synthetic oligonucleotide
tguccagcuuuauugggaggctu

SEQ ID NO: 727 - DNA, 23 bp, Artificial Sequence
  Description of Artificial Sequence: Synthetic oligonucleotide
  Description of Combined DNA/RNA Molecule: Synthetic oligonucleotide
tguccagcuuuauugggaggctu

SEQ ID NO: 728 - DNA, 23 bp, Artificial Sequence
  Description of Artificial Sequence: Synthetic oligonucleotide
  Description of Combined DNA/RNA Molecule: Synthetic oligonucleotide
tguccagcuuuauugggaggctu

SEQ ID NO: 729 - DNA, 23 bp, Artificial Sequence
  Description of Artificial Sequence: Synthetic oligonucleotide
  Description of Combined DNA/RNA Molecule: Synthetic oligonucleotide
tguccagcuuuauugggaggctu

SEQ ID NO: 730 - DNA, 23 bp, Artificial Sequence
  Description of Artificial Sequence: Synthetic oligonucleotide
  Description of Combined DNA/RNA Molecule: Synthetic oligonucleotide
tguccagcuuuauugggaggctu

SEQ ID NO: 731 - DNA, 23 bp, Artificial Sequence
  Description of Artificial Sequence: Synthetic oligonucleotide
  Description of Combined DNA/RNA Molecule: Synthetic oligonucleotide
tguccagcuuuauugggaggctu

SEQ ID NO: 732 - DNA, 23 bp, Artificial Sequence
  Description of Artificial Sequence: Synthetic oligonucleotide
  Description of Combined DNA/RNA Molecule: Synthetic oligonucleotide
tguccagcuuuauugggaggctu

SEQ ID NO: 733 - DNA, 23 bp, Artificial Sequence
  Description of Artificial Sequence: Synthetic oligonucleotide
  Description of Combined DNA/RNA Molecule: Synthetic oligonucleotide
tguccagcuuuauugggaggctu

SEQ ID NO: 734 - DNA, 23 bp, Artificial Sequence
  Description of Artificial Sequence: Synthetic oligonucleotide
  Description of Combined DNA/RNA Molecule: Synthetic oligonucleotide
tguccagcuuuauugggaggctu

SEQ ID NO: 735 - DNA, 23 bp, Artificial Sequence
  Description of Artificial Sequence: Synthetic oligonucleotide
  Description of Combined DNA/RNA Molecule: Synthetic oligonucleotide
tguccagcuuuauugggaggctu

SEQ ID NO: 736 - DNA, 23 bp, Artificial Sequence
  Description of Artificial Sequence: Synthetic oligonucleotide
  Description of Combined DNA/RNA Molecule: Synthetic oligonucleotide
tguccagcuuuauugggaggctu

SEQ ID NO: 737 - DNA, 23 bp, Artificial Sequence
  Description of Artificial Sequence: Synthetic oligonucleotide
  Description of Combined DNA/RNA Molecule: Synthetic oligonucleotide
tguccagcuuuauugggaggctu

SEQ ID NO: 738 - DNA, 23 bp, Artificial Sequence
  Description of Artificial Sequence: Synthetic oligonucleotide
  Description of Combined DNA/RNA Molecule: Synthetic oligonucleotide
tguccagcuuuauugggaggctu

SEQ ID NO: 739 - DNA, 23 bp, Artificial Sequence
  Description of Artificial Sequence: Synthetic oligonucleotide
  Description of Combined DNA/RNA Molecule: Synthetic oligonucleotide
tguccagcuuuauugggaggctu

SEQ ID NO: 740 - DNA, 23 bp, Artificial Sequence
  Description of Artificial Sequence: Synthetic oligonucleotide
  Description of Combined DNA/RNA Molecule: Synthetic oligonucleotide
tguccagcuuuauugggaggctu

SEQ ID NO: 741 - DNA, 23 bp, Artificial Sequence
  Description of Artificial Sequence: Synthetic oligonucleotide
  Description of Combined DNA/RNA Molecule: Synthetic oligonucleotide
tguccagcuuuauugggaggctu

SEQ ID NO: 742 - DNA, 23 bp, Artificial Sequence
  Description of Artificial Sequence: Synthetic oligonucleotide
  Description of Combined DNA/RNA Molecule: Synthetic oligonucleotide
tguccagcuuuauugggaggctu

SEQ ID NO: 743 - DNA, 23 bp, Artificial Sequence
  Description of Artificial Sequence: Synthetic oligonucleotide
  Description of Combined DNA/RNA Molecule: Synthetic oligonucleotide
tguccagcuuuauugggaggctu

SEQ ID NO: 744 - DNA, 23 bp, Artificial Sequence
  Description of Artificial Sequence: Synthetic oligonucleotide
  Description of Combined DNA/RNA Molecule: Synthetic oligonucleotide
tguccagcuuuauugggaggctu

SEQ ID NO: 745 - DNA, 23 bp, Artificial Sequence
  Description of Artificial Sequence: Synthetic oligonucleotide
  Description of Combined DNA/RNA Molecule: Synthetic oligonucleotide
tguccagcuuuauugggaggctu

SEQ ID NO: 746 - DNA, 23 bp, Artificial Sequence
  Description of Artificial Sequence: Synthetic oligonucleotide
  Description of Combined DNA/RNA Molecule: Synthetic oligonucleotide
tguccagcuuuauugggaggctu

SEQ ID NO: 747 - DNA, 23 bp, Artificial Sequence
  Description of Artificial Sequence: Synthetic oligonucleotide
  Description of Combined DNA/RNA Molecule: Synthetic oligonucleotide
tguccagcuuuauugggaggctu

SEQ ID NO: 748 - DNA, 23 bp, Artificial Sequence
  Description of Artificial Sequence: Synthetic oligonucleotide
  Description of Combined DNA/RNA Molecule: Synthetic oligonucleotide
tguccagcuuuauugggaggctu

SEQ ID NO: 749 - DNA, 23 bp, Artificial Sequence
  Description of Artificial Sequence: Synthetic oligonucleotide
  Description of Combined DNA/RNA Molecule: Synthetic oligonucleotide
tguccagcuuuauugggaggctu

SEQ ID NO: 750 - DNA, 23 bp, Artificial Sequence
  Description of Artificial Sequence: Synthetic oligonucleotide
  Description of Combined DNA/RNA Molecule: Synthetic oligonucleotide
tguccagcuuuauugggaggctu

SEQ ID NO: 751 - DNA, 23 bp, Artificial Sequence
  Description of Artificial Sequence: Synthetic oligonucleotide
  Description of Combined DNA/RNA Molecule: Synthetic oligonucleotide
tguccagcuuuauugggaggctu

SEQ ID NO: 752 - DNA, 23 bp, Artificial Sequence
  Description of Artificial Sequence: Synthetic oligonucleotide
  Description of Combined DNA/RNA Molecule: Synthetic oligonucleotide
tguccagcuuuauugggaggctu

SEQ ID NO: 753 - DNA, 23 bp, Artificial Sequence
  Description of Artificial Sequence: Synthetic oligonucleotide
  Description of Combined DNA/RNA Molecule: Synthetic oligonucleotide
tguccagcuuuauugggaggctu

SEQ ID NO: 754 - DNA, 23 bp, Artificial Sequence
  Description of Artificial Sequence: Synthetic oligonucleotide
  Description of Combined DNA/RNA Molecule: Synthetic oligonucleotide
tguccagcuuuauugggaggctu

SEQ ID NO: 755 - DNA, 23 bp, Artificial Sequence
  Description of Artificial Sequence: Synthetic oligonucleotide
  Description of Combined DNA/RNA Molecule: Synthetic oligonucleotide
tguccagcuuuauugggaggctu

SEQ ID NO: 756 - DNA, 23 bp, Artificial Sequence
  Description of Artificial Sequence: Synthetic oligonucleotide
  Description of Combined DNA/RNA Molecule: Synthetic oligonucleotide
tguccagcuuuauugggaggctu

SEQ ID NO: 757 - DNA, 23 bp, Artificial Sequence
  Description of Artificial Sequence: Synthetic oligonucleotide
  Description of Combined DNA/RNA Molecule: Synthetic oligonucleotide
tguccagcuuuauugggaggctu

SEQ ID NO: 758 - DNA, 23 bp, Artificial Sequence
  Description of Artificial Sequence: Synthetic oligonucleotide
  Description of Combined DNA/RNA Molecule: Synthetic oligonucleotide
tguccagcuuuauugggaggctu

SEQ ID NO: 759 - DNA, 23 bp, Artificial Sequence
  Description of Artificial Sequence: Synthetic oligonucleotide
  Description of Combined DNA/RNA Molecule: Synthetic oligonucleotide
tguccagcuuuauugggaggctu

SEQ ID NO: 760 - DNA, 20 bp, Artificial Sequence
  Description of Artificial Sequence: Synthetic oligonucleotide
agcttcttgtccagctttat

SEQ ID NO: 761 - DNA, 20 bp, Artificial Sequence
  Description of Artificial Sequence: Synthetic oligonucleotide
agcttcttgtccagctttat

SEQ ID NO: 762 - DNA, 20 bp, Artificial Sequence
  Description of Artificial Sequence: Synthetic oligonucleotide
agcttcttgtccagctttat

SEQ ID NO: 763 - DNA, 20 bp, Artificial Sequence
  Description of Artificial Sequence: Synthetic oligonucleotide
agcttcttgtccagctttat

SEQ ID NO: 764 - DNA, 20 bp, Artificial Sequence
  Description of Artificial Sequence: Synthetic oligonucleotide
agcttcttgtccagctttat

SEQ ID NO: 765 - DNA, 20 bp, Artificial Sequence
  Description of Artificial Sequence: Synthetic oligonucleotide
agcttcttgtccagctttat

SEQ ID NO: 766 - DNA, 20 bp, Artificial Sequence
  Description of Artificial Sequence: Synthetic oligonucleotide
  Description of Combined DNA/RNA Molecule: Synthetic oligonucleotide
agcutcttgtccagctuuau

SEQ ID NO: 767 - DNA, 20 bp, Artificial Sequence
  Description of Artificial Sequence: Synthetic oligonucleotide
  Description of Combined DNA/RNA Molecule: Synthetic oligonucleotide
agcuucttgtccagcuuuau

SEQ ID NO: 768 - DNA, 20 bp, Artificial Sequence
  Description of Artificial Sequence: Synthetic oligonucleotide
  Description of Combined DNA/RNA Molecule: Synthetic oligonucleotide
agcuucttgtccagcuuuau

SEQ ID NO: 769 - DNA, 20 bp, Artificial Sequence
  Description of Artificial Sequence: Synthetic oligonucleotide
  Description of Combined DNA/RNA Molecule: Synthetic oligonucleotide
agcuucttgtccagcuuuau

SEQ ID NO: 770 - DNA, 20 bp, Artificial Sequence
  Description of Artificial Sequence: Synthetic oligonucleotide
  Description of Combined DNA/RNA Molecule: Synthetic oligonucleotide
agcuucttgtccagcuuuau

SEQ ID NO: 771 - DNA, 20 bp, Artificial Sequence
  Description of Artificial Sequence: Synthetic oligonucleotide
  Description of Combined DNA/RNA Molecule: Synthetic oligonucleotide
agcuucttgtccagcuuuau

SEQ ID NO: 772 - DNA, 20 bp, Artificial Sequence
  Description of Artificial Sequence: Synthetic oligonucleotide
  Description of Combined DNA/RNA Molecule: Synthetic oligonucleotide
agcuucttgtccagcuuuau

SEQ ID NO: 773 - DNA, 20 bp, Artificial Sequence
  Description of Artificial Sequence: Synthetic oligonucleotide
  Description of Combined DNA/RNA Molecule: Synthetic oligonucleotide
agcuucttgtccagcuuuau

SEQ ID NO: 774 - DNA, 20 bp, Artificial Sequence
  Description of Artificial Sequence: Synthetic oligonucleotide
agcttcttgtccagctttat

SEQ ID NO: 775 - DNA, 20 bp, Artificial Sequence
  Description of Artificial Sequence: Synthetic oligonucleotide
agcttcttgtccagctttat

SEQ ID NO: 776 - DNA, 20 bp, Artificial Sequence
  Description of Artificial Sequence: Synthetic oligonucleotide
agcttcttgtccagctttat

SEQ ID NO: 777 - DNA, 20 bp, Artificial Sequence
  Description of Artificial Sequence: Synthetic oligonucleotide
agcttcttgtccagctttat

SEQ ID NO: 778 - DNA, 20 bp, Artificial Sequence
  Description of Artificial Sequence: Synthetic oligonucleotide
agcttcttgtccagctttat

SEQ ID NO: 779 - DNA, 20 bp, Artificial Sequence
  Description of Artificial Sequence: Synthetic oligonucleotide
agcttcttgtccagctttat

SEQ ID NO: 780 - DNA, 20 bp, Artificial Sequence
  Description of Artificial Sequence: Synthetic oligonucleotide
agcttcttgtccagctttat

SEQ ID NO: 781 - DNA, 20 bp, Artificial Sequence
  Description of Artificial Sequence: Synthetic oligonucleotide
  Description of Combined DNA/RNA Molecule: Synthetic oligonucleotide
agcutcttgtccagctuuat

SEQ ID NO: 782 - DNA, 20 bp, Artificial Sequence
  Description of Artificial Sequence: Synthetic oligonucleotide
  Description of Combined DNA/RNA Molecule: Synthetic oligonucleotide
agcutcttgtccagctuuat

SEQ ID NO: 783 - DNA, 20 bp, Artificial Sequence
  Description of Artificial Sequence: Synthetic oligonucleotide
  Description of Combined DNA/RNA Molecule: Synthetic oligonucleotide
agcutcttgtccagctuuat

SEQ ID NO: 784 - DNA, 20 bp, Artificial Sequence
  Description of Artificial Sequence: Synthetic oligonucleotide
  Description of Combined DNA/RNA Molecule: Synthetic oligonucleotide
agcuucttgtccagctuuat

SEQ ID NO: 785 - DNA, 20 bp, Artificial Sequence
  Description of Artificial Sequence: Synthetic oligonucleotide
  Description of Combined DNA/RNA Molecule: Synthetic oligonucleotide
agcutcttgtccagctuuat

SEQ ID NO: 786 - DNA, 20 bp, Artificial Sequence
  Description of Artificial Sequence: Synthetic oligonucleotide
  Description of Combined DNA/RNA Molecule: Synthetic oligonucleotide
agcutcttgtccagctuuat

SEQ ID NO: 787 - DNA, 20 bp, Artificial Sequence
  Description of Artificial Sequence: Synthetic oligonucleotide
  Description of Combined DNA/RNA Molecule: Synthetic oligonucleotide
agcutcttgtccagctuuat

SEQ ID NO: 788 - DNA, 20 bp, Artificial Sequence
  Description of Artificial Sequence: Synthetic oligonucleotide
  Description of Combined DNA/RNA Molecule: Synthetic oligonucleotide
agcutcttgtccagctuuat

SEQ ID NO: 789 - DNA, 20 bp, Artificial Sequence
  Description of Artificial Sequence: Synthetic oligonucleotide
  Description of Combined DNA/RNA Molecule: Synthetic oligonucleotide
agcutcttgtccagctuuat

SEQ ID NO: 790 - DNA, 20 bp, Artificial Sequence
  Description of Artificial Sequence: Synthetic oligonucleotide
  Description of Combined DNA/RNA Molecule: Synthetic oligonucleotide
agcutcttgtccagctuuat

SEQ ID NO: 791 - DNA, 20 bp, Artificial Sequence
  Description of Artificial Sequence: Synthetic oligonucleotide
agcttcttgtccagctttat

SEQ ID NO: 792 - DNA, 20 bp, Artificial Sequence
  Description of Artificial Sequence: Synthetic oligonucleotide
agcttcttgtccagctttat

SEQ ID NO: 793 - DNA, 20 bp, Artificial Sequence
  Description of Artificial Sequence: Synthetic oligonucleotide
agcttcttgtccagctttat

SEQ ID NO: 794 - DNA, 20 bp, Artificial Sequence
  Description of Artificial Sequence: Synthetic oligonucleotide
agcttcttgtccagctttat

SEQ ID NO: 795 - DNA, 20 bp, Artificial Sequence
  Description of Artificial Sequence: Synthetic oligonucleotide
agcttcttgtccagctttat

SEQ ID NO: 796 - DNA, 20 bp, Artificial Sequence
  Description of Artificial Sequence: Synthetic oligonucleotide
agcttcttgtccagctttat

SEQ ID NO: 797 - DNA, 23 bp, Artificial Sequence
  Description of Artificial Sequence: Synthetic oligonucleotide
  Description of Combined DNA/RNA Molecule: Synthetic oligonucleotide
tguccagcuuuauugggaggctu

SEQ ID NO: 798 - DNA, 23 bp, Artificial Sequence
  Description of Artificial Sequence: Synthetic oligonucleotide
  Description of Combined DNA/RNA Molecule: Synthetic oligonucleotide
tagcuucuuguccagcuuuautu

SEQ ID NO: 799 - DNA, 23 bp, Artificial Sequence
  Description of Artificial Sequence: Synthetic oligonucleotide
  Description of Combined DNA/RNA Molecule: Synthetic oligonucleotide
tagcuucuuguccagcuuuautu

SEQ ID NO: 800 - DNA, 21 bp, Artificial Sequence
  Description of Artificial Sequence: Synthetic oligonucleotide
  Description of Combined DNA/RNA Molecule: Synthetic oligonucleotide
tguccagcuuuauugggagtu

SEQ ID NO: 801 - DNA, 20 bp, Artificial Sequence
  Description of Artificial Sequence: Synthetic oligonucleotide
agcttcttgtccagctttat

SEQ ID NO: 802 - DNA, 20 bp, Artificial Sequence
  Description of Artificial Sequence: Synthetic oligonucleotide
agcttcttgtccagctttat

SEQ ID NO: 803 - DNA, 20 bp, Artificial Sequence
  Description of Artificial Sequence: Synthetic oligonucleotide
agcttcttgtccagctttat

SEQ ID NO: 804 - DNA, 20 bp, Artificial Sequence
  Description of Artificial Sequence: Synthetic oligonucleotide
agcttcttgtccagctttat

SEQ ID NO: 805 - DNA, 20 bp, Artificial Sequence
  Description of Artificial Sequence: Synthetic oligonucleotide
agcttcttgtccagctttat

SEQ ID NO: 806 - DNA, 20 bp, Artificial Sequence
  Description of Artificial Sequence: Synthetic oligonucleotide
atagcagcttcttgtccagc

SEQ ID NO: 807 - DNA, 20 bp, Artificial Sequence
  Description of Artificial Sequence: Synthetic oligonucleotide
atagcagcttcttgtccagc

SEQ ID NO: 808 - DNA, 20 bp, Artificial Sequence
  Description of Artificial Sequence: Synthetic oligonucleotide
  Description of Combined DNA/RNA Molecule: Synthetic oligonucleotide
auagcagcttcttgtccauc

SEQ ID NO: 809 - DNA, 20 bp, Artificial Sequence
  Description of Artificial Sequence: Synthetic oligonucleotide
atagcagcttcttgtccagc

SEQ ID NO: 810 - DNA, 20 bp, Artificial Sequence
  Description of Artificial Sequence: Synthetic oligonucleotide
atagcagcttcttgtccagc

SEQ ID NO: 811 - DNA, 20 bp, Artificial Sequence
  Description of Artificial Sequence: Synthetic oligonucleotide
atagcagcttcttgtccagc

SEQ ID NO: 812 - DNA, 20 bp, Artificial Sequence
  Description of Artificial Sequence: Synthetic oligonucleotide
  Description of Combined DNA/RNA Molecule: Synthetic oligonucleotide
auagcagcttcttgtccagc

SEQ ID NO: 813 - DNA, 20 bp, Artificial Sequence
  Description of Artificial Sequence: Synthetic oligonucleotide
atagcagcttcttgtccagc

SEQ ID NO: 814 - DNA, 20 bp, Artificial Sequence
  Description of Artificial Sequence: Synthetic oligonucleotide
atagcagcttcttgtccagc

SEQ ID NO: 815 - DNA, 20 bp, Artificial Sequence
  Description of Artificial Sequence: Synthetic oligonucleotide
atagcagcttcttgtccagc

SEQ ID NO: 816 - DNA, 20 bp, Artificial Sequence
  Description of Artificial Sequence: Synthetic oligonucleotide
  Description of Combined DNA/RNA Molecule: Synthetic oligonucleotide
auagcagcttcttgtccauc

SEQ ID NO: 817 - DNA, 20 bp, Artificial Sequence
  Description of Artificial Sequence: Synthetic oligonucleotide
  Description of Combined DNA/RNA Molecule: Synthetic oligonucleotide
auagcagcttcttgtccauc

SEQ ID NO: 818 - DNA, 20 bp, Artificial Sequence
  Description of Artificial Sequence: Synthetic oligonucleotide
  Description of Combined DNA/RNA Molecule: Synthetic oligonucleotide
auagcagcttcttgtccauc

SEQ ID NO: 819 - DNA, 20 bp, Artificial Sequence
  Description of Artificial Sequence: Synthetic oligonucleotide
atagcagcttcttgtccagc

SEQ ID NO: 820 - DNA, 20 bp, Artificial Sequence
  Description of Artificial Sequence: Synthetic oligonucleotide
atagcagcttcttgtccagc

SEQ ID NO: 821 - DNA, 20 bp, Artificial Sequence
  Description of Artificial Sequence: Synthetic oligonucleotide
atagcagcttcttgtccagc

SEQ ID NO: 822 - DNA, 20 bp, Artificial Sequence
  Description of Artificial Sequence: Synthetic oligonucleotide
  Description of Combined DNA/RNA Molecule: Synthetic oligonucleotide
auagcagcttcttgtccagc

SEQ ID NO: 823 - DNA, 20 bp, Artificial Sequence
  Description of Artificial Sequence: Synthetic oligonucleotide
  Description of Combined DNA/RNA Molecule: Synthetic oligonucleotide
auagcagcttcttgtccagc

SEQ ID NO: 824 - DNA, 20 bp, Artificial Sequence
  Description of Artificial Sequence: Synthetic oligonucleotide
  Description of Combined DNA/RNA Molecule: Synthetic oligonucleotide
auagcagcttcttgtccagc

SEQ ID NO: 825 - DNA, 20 bp, Artificial Sequence
  Description of Artificial Sequence: Synthetic oligonucleotide
atagcagcttcttgtcgagc

SEQ ID NO: 826 - DNA, 20 bp, Artificial Sequence
  Description of Artificial Sequence: Synthetic oligonucleotide
atagcagcttcttgtccagc

SEQ ID NO: 827 - DNA, 20 bp, Artificial Sequence
  Description of Artificial Sequence: Synthetic oligonucleotide
atagcagcttcttgtccagc

SEQ ID NO: 828 - DNA, 20 bp, Artificial Sequence
  Description of Artificial Sequence: Synthetic oligonucleotide
  Description of Combined DNA/RNA Molecule: Synthetic oligonucleotide
auagcagcttcttgtccauc

SEQ ID NO: 829 - DNA, 20 bp, Artificial Sequence
  Description of Artificial Sequence: Synthetic oligonucleotide
  Description of Combined DNA/RNA Molecule: Synthetic oligonucleotide
auagcagcttcttgtccauc

SEQ ID NO: 830 - DNA, 20 bp, Artificial Sequence
  Description of Artificial Sequence: Synthetic oligonucleotide
  Description of Combined DNA/RNA Molecule: Synthetic oligonucleotide
auagcagcttcttgtccauc

SEQ ID NO: 831 - DNA, 20 bp, Artificial Sequence
  Description of Artificial Sequence: Synthetic oligonucleotide
atagcagcttcttgtccagc

SEQ ID NO: 832 - DNA, 20 bp, Artificial Sequence
  Description of Artificial Sequence: Synthetic oligonucleotide
  Description of Combined DNA/RNA Molecule: Synthetic oligonucleotide
auagcagcttcttgtccagc

SEQ ID NO: 833 - DNA, 20 bp, Artificial Sequence
  Description of Artificial Sequence: Synthetic oligonucleotide
  Description of Combined DNA/RNA Molecule: Synthetic oligonucleotide
auagcagcttcttgtccagc

SEQ ID NO: 834 - DNA, 20 bp, Artificial Sequence
  Description of Artificial Sequence: Synthetic oligonucleotide
  Description of Combined DNA/RNA Molecule: Synthetic oligonucleotide
auagcagcttcttgtccagc

SEQ ID NO: 835 - DNA, 20 bp, Artificial Sequence
  Description of Artificial Sequence: Synthetic oligonucleotide
atagcagcttcttgtccagc

SEQ ID NO: 836 - DNA, 20 bp, Artificial Sequence
  Description of Artificial Sequence: Synthetic oligonucleotide
  Description of Combined DNA/RNA Molecule: Synthetic oligonucleotide
auagcagcttcttgtccagc

SEQ ID NO: 837 - DNA, 20 bp, Artificial Sequence
  Description of Artificial Sequence: Synthetic oligonucleotide
  Description of Combined DNA/RNA Molecule: Synthetic oligonucleotide
auagcagcttcttgtccagc

SEQ ID NO: 838 - DNA, 20 bp, Artificial Sequence
  Description of Artificial Sequence: Synthetic oligonucleotide
  Description of Combined DNA/RNA Molecule: Synthetic oligonucleotide
auagcagcttcttgtccagc

SEQ ID NO: 839 - DNA, 20 bp, Artificial Sequence
  Description of Artificial Sequence: Synthetic oligonucleotide
  Description of Combined DNA/RNA Molecule: Synthetic oligonucleotide
auagcagcttcttgtccagc

SEQ ID NO: 840 - DNA, 20 bp, Artificial Sequence
  Description of Artificial Sequence: Synthetic oligonucleotide
  Description of Combined DNA/RNA Molecule: Synthetic oligonucleotide
auagcagcttcttgtccagc

SEQ ID NO: 841 - DNA, 20 bp, Artificial Sequence
  Description of Artificial Sequence: Synthetic oligonucleotide
  Description of Combined DNA/RNA Molecule: Synthetic oligonucleotide
auagcagcttcttgtccagc

SEQ ID NO: 842 - DNA, 20 bp, Artificial Sequence
  Description of Artificial Sequence: Synthetic oligonucleotide
  Description of Combined DNA/RNA Molecule: Synthetic oligonucleotide
auagcagcttcttgtccagc

SEQ ID NO: 843 - DNA, 20 bp, Artificial Sequence
  Description of Artificial Sequence: Synthetic oligonucleotide
  Description of Combined DNA/RNA Molecule: Synthetic oligonucleotide
auagcagcttcttgtccagc

SEQ ID NO: 844 - DNA, 22 bp, Artificial Sequence
  Description of Artificial Sequence: Synthetic oligonucleotide
  Description of Combined DNA/RNA Molecule: Synthetic oligonucleotide
tguccagcuuauugggaggctu

SEQ ID NO: 845 - DNA, 22 bp, Artificial Sequence
  Description of Artificial Sequence: Synthetic oligonucleotide
  Description of Combined DNA/RNA Molecule: Synthetic oligonucleotide
tguccagcuuauugggaggctu

SEQ ID NO: 846 - DNA, 22 bp, Artificial Sequence
  Description of Artificial Sequence: Synthetic oligonucleotide
  Description of Combined DNA/RNA Molecule: Synthetic oligonucleotide
tguccagcuuauugggaggctu

SEQ ID NO: 847 - DNA, 22 bp, Artificial Sequence
  Description of Artificial Sequence: Synthetic oligonucleotide
  Description of Combined DNA/RNA Molecule: Synthetic oligonucleotide
tguccagcuuauugggaggctu

SEQ ID NO: 848 - DNA, 22 bp, Artificial Sequence
  Description of Artificial Sequence: Synthetic oligonucleotide
  Description of Combined DNA/RNA Molecule: Synthetic oligonucleotide
tguccagcuuauugggaggctu

SEQ ID NO: 849 - DNA, 22 bp, Artificial Sequence
  Description of Artificial Sequence: Synthetic oligonucleotide
  Description of Combined DNA/RNA Molecule: Synthetic oligonucleotide
tguccagcuuauugggaggctu

SEQ ID NO: 850 - DNA, 22 bp, Artificial Sequence
  Description of Artificial Sequence: Synthetic oligonucleotide
  Description of Combined DNA/RNA Molecule: Synthetic oligonucleotide
tguccagcuuauugggaggctu

SEQ ID NO: 851 - DNA, 22 bp, Artificial Sequence
  Description of Artificial Sequence: Synthetic oligonucleotide
  Description of Combined DNA/RNA Molecule: Synthetic oligonucleotide
tguccagcuuauugggaggctu

SEQ ID NO: 852 - DNA, 23 bp, Artificial Sequence
  Description of Artificial Sequence: Synthetic oligonucleotide
  Description of Combined DNA/RNA Molecule: Synthetic oligonucleotide
tguccagcuuuauugggaggctu

SEQ ID NO: 853 - DNA, 23 bp, Artificial Sequence
  Description of Artificial Sequence: Synthetic oligonucleotide
  Description of Combined DNA/RNA Molecule: Synthetic oligonucleotide
tagcuucuuguccagcuuuautu

SEQ ID NO: 854 - DNA, 23 bp, Artificial Sequence
  Description of Artificial Sequence: Synthetic oligonucleotide
  Description of Combined DNA/RNA Molecule: Synthetic oligonucleotide
tguccagcuuuauugggaggctu

SEQ ID NO: 855 - DNA, 23 bp, Artificial Sequence
  Description of Artificial Sequence: Synthetic oligonucleotide
  Description of Combined DNA/RNA Molecule: Synthetic oligonucleotide
tagcuucuuguccagcuuuautu

SEQ ID NO: 856 - DNA, 23 bp, Artificial Sequence
  Description of Artificial Sequence: Synthetic oligonucleotide
  Description of Combined DNA/RNA Molecule: Synthetic oligonucleotide
tguccagcuuuauugggaggctu

SEQ ID NO: 857 - DNA, 23 bp, Artificial Sequence
  Description of Artificial Sequence: Synthetic oligonucleotide
  Description of Combined DNA/RNA Molecule: Synthetic oligonucleotide
tagcuucuuguccagcuuuautu

SEQ ID NO: 858 - DNA, 23 bp, Artificial Sequence
  Description of Artificial Sequence: Synthetic oligonucleotide
  Description of Combined DNA/RNA Molecule: Synthetic oligonucleotide
tguccagcuuuauugggaggctu

SEQ ID NO: 859 - DNA, 23 bp, Artificial Sequence
  Description of Artificial Sequence: Synthetic oligonucleotide
  Description of Combined DNA/RNA Molecule: Synthetic oligonucleotide
tagcuucuuguccagcuuuautu

SEQ ID NO: 860 - DNA, 23 bp, Artificial Sequence
  Description of Artificial Sequence: Synthetic oligonucleotide
  Description of Combined DNA/RNA Molecule: Synthetic oligonucleotide
tguccagcuuuauugggaggctu

SEQ ID NO: 861 - DNA, 23 bp, Artificial Sequence
  Description of Artificial Sequence: Synthetic oligonucleotide
  Description of Combined DNA/RNA Molecule: Synthetic oligonucleotide
tagcuucuuguccagcuuuautu

SEQ ID NO: 862 - DNA, 23 bp, Artificial Sequence
  Description of Artificial Sequence: Synthetic oligonucleotide
  Description of Combined DNA/RNA Molecule: Synthetic oligonucleotide
tguccagcuuuauugggaggctu

SEQ ID NO: 863 - DNA, 23 bp, Artificial Sequence
  Description of Artificial Sequence: Synthetic oligonucleotide
  Description of Combined DNA/RNA Molecule: Synthetic oligonucleotide
tagcuucuuguccagcuuuautu

SEQ ID NO: 864 - DNA, 23 bp, Artificial Sequence
  Description of Artificial Sequence: Synthetic oligonucleotide
  Description of Combined DNA/RNA Molecule: Synthetic oligonucleotide
tguccagcuuuauugggaggctu

SEQ ID NO: 865 - DNA, 23 bp, Artificial Sequence
  Description of Artificial Sequence: Synthetic oligonucleotide
  Description of Combined DNA/RNA Molecule: Synthetic oligonucleotide
tagcuucuuguccagcuuuautu

SEQ ID NO: 866 - DNA, 23 bp, Artificial Sequence
  Description of Artificial Sequence: Synthetic oligonucleotide
  Description of Combined DNA/RNA Molecule: Synthetic oligonucleotide
tguccagcuuuauugggaggctu

SEQ ID NO: 867 - DNA, 23 bp, Artificial Sequence
  Description of Artificial Sequence: Synthetic oligonucleotide
  Description of Combined DNA/RNA Molecule: Synthetic oligonucleotide
tagcuucuuguccagcuuuautu

SEQ ID NO: 868 - DNA, 23 bp, Artificial Sequence
  Description of Artificial Sequence: Synthetic oligonucleotide
  Description of Combined DNA/RNA Molecule: Synthetic oligonucleotide
tguccagcuuuauugggaggctu

SEQ ID NO: 869 - DNA, 23 bp, Artificial Sequence
  Description of Artificial Sequence: Synthetic oligonucleotide
  Description of Combined DNA/RNA Molecule: Synthetic oligonucleotide
tagcuucuuguccagcuuuautu

SEQ ID NO: 870 - DNA, 23 bp, Artificial Sequence
  Description of Artificial Sequence: Synthetic oligonucleotide
  Description of Combined DNA/RNA Molecule: Synthetic oligonucleotide
tguccagcuuuauugggaggctu

SEQ ID NO: 871 - DNA, 23 bp, Artificial Sequence
  Description of Artificial Sequence: Synthetic oligonucleotide
  Description of Combined DNA/RNA Molecule: Synthetic oligonucleotide
tagcuucuuguccagctttattu

SEQ ID NO: 872 - DNA, 23 bp, Artificial Sequence
  Description of Artificial Sequence: Synthetic oligonucleotide
  Description of Combined DNA/RNA Molecule: Synthetic oligonucleotide
tguccagcuuuauugggaggctu

SEQ ID NO: 873 - DNA, 23 bp, Artificial Sequence
  Description of Artificial Sequence: Synthetic oligonucleotide
  Description of Combined DNA/RNA Molecule: Synthetic oligonucleotide
tagcuucuuguccagctttattu

SEQ ID NO: 874 - DNA, 23 bp, Artificial Sequence
  Description of Artificial Sequence: Synthetic oligonucleotide
  Description of Combined DNA/RNA Molecule: Synthetic oligonucleotide
tguccagcuuuauugggaggctu

SEQ ID NO: 875 - DNA, 23 bp, Artificial Sequence
  Description of Artificial Sequence: Synthetic oligonucleotide
  Description of Combined DNA/RNA Molecule: Synthetic oligonucleotide
tagcuucuuguccagctttattu

SEQ ID NO: 876 - DNA, 23 bp, Artificial Sequence
  Description of Artificial Sequence: Synthetic oligonucleotide
  Description of Combined DNA/RNA Molecule: Synthetic oligonucleotide
tguccagcuuuauugggaggctu

SEQ ID NO: 877 - DNA, 23 bp, Artificial Sequence
  Description of Artificial Sequence: Synthetic oligonucleotide
  Description of Combined DNA/RNA Molecule: Synthetic oligonucleotide
tguccagcuuuauugggaggctu

SEQ ID NO: 878 - DNA, 23 bp, Artificial Sequence
  Description of Artificial Sequence: Synthetic oligonucleotide
  Description of Combined DNA/RNA Molecule: Synthetic oligonucleotide
tagcuucuuguccagcuuuautu

SEQ ID NO: 879 - DNA, 23 bp, Artificial Sequence
  Description of Artificial Sequence: Synthetic oligonucleotide
  Description of Combined DNA/RNA Molecule: Synthetic oligonucleotide
tagcuucuuguccagcuuuautu

SEQ ID NO: 880 - DNA, 23 bp, Artificial Sequence
  Description of Artificial Sequence: Synthetic oligonucleotide
  Description of Combined DNA/RNA Molecule: Synthetic oligonucleotide
tagcuucuuguccagcuuuautu

SEQ ID NO: 881 - DNA, 23 bp, Artificial Sequence
  Description of Artificial Sequence: Synthetic oligonucleotide
  Description of Combined DNA/RNA Molecule: Synthetic oligonucleotide
tguccagcuuuauugggaggctu

SEQ ID NO: 882 - DNA, 23 bp, Artificial Sequence
  Description of Artificial Sequence: Synthetic oligonucleotide
  Description of Combined DNA/RNA Molecule: Synthetic oligonucleotide
tguccagcuuuauugggaggctu

SEQ ID NO: 883 - DNA, 23 bp, Artificial Sequence
  Description of Artificial Sequence: Synthetic oligonucleotide
  Description of Combined DNA/RNA Molecule: Synthetic oligonucleotide
tagcuucuuguccagcuuuautu

SEQ ID NO: 884 - DNA, 23 bp, Artificial Sequence
  Description of Artificial Sequence: Synthetic oligonucleotide
  Description of Combined DNA/RNA Molecule: Synthetic oligonucleotide
tagcuucuuguccagcuuuautu

SEQ ID NO: 885 - DNA, 23 bp, Artificial Sequence
  Description of Artificial Sequence: Synthetic oligonucleotide
  Description of Combined DNA/RNA Molecule: Synthetic oligonucleotide
tguccagcuuuauugggaggctu

SEQ ID NO: 886 - DNA, 23 bp, Artificial Sequence
  Description of Artificial Sequence: Synthetic oligonucleotide
  Description of Combined DNA/RNA Molecule: Synthetic oligonucleotide
tagcuucuuguccagcuuuautu

SEQ ID NO: 887 - DNA, 23 bp, Artificial Sequence
  Description of Artificial Sequence: Synthetic oligonucleotide
  Description of Combined DNA/RNA Molecule: Synthetic oligonucleotide
tguccagcuuuauugggaggctu

SEQ ID NO: 888 - DNA, 23 bp, Artificial Sequence
  Description of Artificial Sequence: Synthetic oligonucleotide
  Description of Combined DNA/RNA Molecule: Synthetic oligonucleotide
tagcuucuuguccagcuuuautu

SEQ ID NO: 889 - DNA, 23 bp, Artificial Sequence
  Description of Artificial Sequence: Synthetic oligonucleotide
  Description of Combined DNA/RNA Molecule: Synthetic oligonucleotide
tguccagcuuuauugggaggctu

SEQ ID NO: 890 - DNA, 23 bp, Artificial Sequence
  Description of Artificial Sequence: Synthetic oligonucleotide
  Description of Combined DNA/RNA Molecule: Synthetic oligonucleotide
tagcuucuuguccagcuuuautu

SEQ ID NO: 891 - DNA, 23 bp, Artificial Sequence
  Description of Artificial Sequence: Synthetic oligonucleotide
  Description of Combined DNA/RNA Molecule: Synthetic oligonucleotide
tguccagcuuuauugggaggctu

SEQ ID NO: 892 - DNA, 23 bp, Artificial Sequence
  Description of Artificial Sequence: Synthetic oligonucleotide
  Description of Combined DNA/RNA Molecule: Synthetic oligonucleotide
tagcuucuuguccagcuuuautu

SEQ ID NO: 893 - DNA, 23 bp, Artificial Sequence
  Description of Artificial Sequence: Synthetic oligonucleotide
  Description of Combined DNA/RNA Molecule: Synthetic oligonucleotide
tguccagcuuuauugggaggctu

SEQ ID NO: 894 - DNA, 23 bp, Artificial Sequence
  Description of Artificial Sequence: Synthetic oligonucleotide
  Description of Combined DNA/RNA Molecule: Synthetic oligonucleotide
tagcuucuuguccagcuuuautu

SEQ ID NO: 895 - DNA, 23 bp, Artificial Sequence
  Description of Artificial Sequence: Synthetic oligonucleotide
  Description of Combined DNA/RNA Molecule: Synthetic oligonucleotide
tguccagcuuuauugggaggctu

SEQ ID NO: 896 - DNA, 23 bp, Artificial Sequence
  Description of Artificial Sequence: Synthetic oligonucleotide
  Description of Combined DNA/RNA Molecule: Synthetic oligonucleotide
tagcuucuuguccagcuuuautu

SEQ ID NO: 897 - DNA, 23 bp, Artificial Sequence
  Description of Artificial Sequence: Synthetic oligonucleotide
  Description of Combined DNA/RNA Molecule: Synthetic oligonucleotide
tguccagcuuuauugggaggctu

SEQ ID NO: 898 - DNA, 23 bp, Artificial Sequence
  Description of Artificial Sequence: Synthetic oligonucleotide
  Description of Combined DNA/RNA Molecule: Synthetic oligonucleotide
tagcuucuuguccagcuuuautu

SEQ ID NO: 899 - DNA, 23 bp, Artificial Sequence
  Description of Artificial Sequence: Synthetic oligonucleotide
  Description of Combined DNA/RNA Molecule: Synthetic oligonucleotide
tguccagcuuuauugggaggctu

SEQ ID NO: 900 - DNA, 23 bp, Artificial Sequence
  Description of Artificial Sequence: Synthetic oligonucleotide
  Description of Combined DNA/RNA Molecule: Synthetic oligonucleotide
tagcuucuuguccagcuuuautu

SEQ ID NO: 901 - DNA, 23 bp, Artificial Sequence
  Description of Artificial Sequence: Synthetic oligonucleotide
  Description of Combined DNA/RNA Molecule: Synthetic oligonucleotide
tuuguccagcuuuauugggagtu

SEQ ID NO: 902 - DNA, 23 bp, Artificial Sequence
  Description of Artificial Sequence: Synthetic oligonucleotide
  Description of Combined DNA/RNA Molecule: Synthetic oligonucleotide
tcuuguccagcuuuauugggatu

SEQ ID NO: 903 - DNA, 23 bp, Artificial Sequence
  Description of Artificial Sequence: Synthetic oligonucleotide
  Description of Combined DNA/RNA Molecule: Synthetic oligonucleotide
tucuuguccagcuuuauugggtu

SEQ ID NO: 904 - DNA, 23 bp, Artificial Sequence
  Description of Artificial Sequence: Synthetic oligonucleotide
  Description of Combined DNA/RNA Molecule: Synthetic oligonucleotide
tuagcagcuucuuguccagcutu

SEQ ID NO: 905 - DNA, 23 bp, Artificial Sequence
  Description of Artificial Sequence: Synthetic oligonucleotide
  Description of Combined DNA/RNA Molecule: Synthetic oligonucleotide
tauagcagcuucuuguccagctu

SEQ ID NO: 906 - DNA, 23 bp, Artificial Sequence
  Description of Artificial Sequence: Synthetic oligonucleotide
  Description of Combined DNA/RNA Molecule: Synthetic oligonucleotide
tcauagcagcuucuuguccagtu

SEQ ID NO: 907 - DNA, 23 bp, Artificial Sequence
  Description of Artificial Sequence: Synthetic oligonucleotide
  Description of Combined DNA/RNA Molecule: Synthetic oligonucleotide
tuuguccagcuuuauugggagtu

SEQ ID NO: 908 - DNA, 23 bp, Artificial Sequence
  Description of Artificial Sequence: Synthetic oligonucleotide
  Description of Combined DNA/RNA Molecule: Synthetic oligonucleotide
tcuuguccagcuuuauugggatu

SEQ ID NO: 909 - DNA, 23 bp, Artificial Sequence
  Description of Artificial Sequence: Synthetic oligonucleotide
  Description of Combined DNA/RNA Molecule: Synthetic oligonucleotide
tucuuguccagcuuuauugggtu

SEQ ID NO: 910 - DNA, 23 bp, Artificial Sequence
  Description of Artificial Sequence: Synthetic oligonucleotide
  Description of Combined DNA/RNA Molecule: Synthetic oligonucleotide
tuagcagcuucuuguccagcutu

SEQ ID NO: 911 - DNA, 23 bp, Artificial Sequence
  Description of Artificial Sequence: Synthetic oligonucleotide
  Description of Combined DNA/RNA Molecule: Synthetic oligonucleotide
tauagcagcuucuuguccagctu

SEQ ID NO: 912 - DNA, 23 bp, Artificial Sequence
  Description of Artificial Sequence: Synthetic oligonucleotide
  Description of Combined DNA/RNA Molecule: Synthetic oligonucleotide
tcauagcagcuucuuguccagtu

SEQ ID NO: 913 - DNA, 23 bp, Artificial Sequence
  Description of Artificial Sequence: Synthetic oligonucleotide
  Description of Combined DNA/RNA Molecule: Synthetic oligonucleotide
tguccagcuuuauugggaggctu

SEQ ID NO: 914 - DNA, 23 bp, Artificial Sequence
  Description of Artificial Sequence: Synthetic oligonucleotide
  Description of Combined DNA/RNA Molecule: Synthetic oligonucleotide
tagcuucuuguccagcuuuautu

SEQ ID NO: 915 - DNA, 20 bp, Artificial Sequence
  Description of Artificial Sequence: Synthetic oligonucleotide
ccagctttattagggacagc

SEQ ID NO: 916 - DNA, 20 bp, Artificial Sequence
  Description of Artificial Sequence: Synthetic oligonucleotide
ccagctttattagggacagc

SEQ ID NO: 917 - DNA, 20 bp, Artificial Sequence
  Description of Artificial Sequence: Synthetic oligonucleotide
ggagcagctgcctctaggga

SEQ ID NO: 918 - DNA, 20 bp, Artificial Sequence
  Description of Artificial Sequence: Synthetic oligonucleotide
tggagcagctgcctctaggg

SEQ ID NO: 919 - DNA, 20 bp, Artificial Sequence
  Description of Artificial Sequence: Synthetic oligonucleotide
tgttcctggagcagctgcct

SEQ ID NO: 920 - DNA, 20 bp, Artificial Sequence
  Description of Artificial Sequence: Synthetic oligonucleotide
tccttggcggtcttggtggc

SEQ ID NO: 921 - DNA, 20 bp, Artificial Sequence
  Description of Artificial Sequence: Synthetic oligonucleotide
atccttggcggtcttggtgg

SEQ ID NO: 922 - DNA, 20 bp, Artificial Sequence
  Description of Artificial Sequence: Synthetic oligonucleotide
catccttggcggtcttggtg

SEQ ID NO: 923 - DNA, 20 bp, Artificial Sequence
  Description of Artificial Sequence: Synthetic oligonucleotide
gcatccttggcggtcttggt

SEQ ID NO: 924 - DNA, 20 bp, Artificial Sequence
  Description of Artificial Sequence: Synthetic oligonucleotide
ctggcctgctgggccacctg

SEQ ID NO: 925 - DNA, 20 bp, Artificial Sequence
  Description of Artificial Sequence: Synthetic oligonucleotide
ggcggtcttggtggcgtgct

SEQ ID NO: 926 - DNA, 20 bp, Artificial Sequence
  Description of Artificial Sequence: Synthetic oligonucleotide
tggcggtcttggtggcgtgc

SEQ ID NO: 927 - DNA, 20 bp, Artificial Sequence
  Description of Artificial Sequence: Synthetic oligonucleotide
ttggcggtcttggtggcgtg

SEQ ID NO: 928 - DNA, 20 bp, Artificial Sequence
  Description of Artificial Sequence: Synthetic oligonucleotide
cttggcggtcttggtggcgt

SEQ ID NO: 929 - DNA, 20 bp, Artificial Sequence
  Description of Artificial Sequence: Synthetic oligonucleotide
ccttggcggtcttggtggcg

SEQ ID NO: 930 - DNA, 20 bp, Artificial Sequence
  Description of Artificial Sequence: Synthetic oligonucleotide
gcccctggcctgctgggcca

SEQ ID NO: 931 - DNA, 20 bp, Artificial Sequence
  Description of Artificial Sequence: Synthetic oligonucleotide
ggcagaggccaggagcgcca

SEQ ID NO: 932 - DNA, 20 bp, Artificial Sequence
  Description of Artificial Sequence: Synthetic oligonucleotide
gaggcatcctcggcctctga

SEQ ID NO: 933 - DNA, 20 bp, Artificial Sequence
  Description of Artificial Sequence: Synthetic oligonucleotide
ggaggcatcctcggcctctg

SEQ ID NO: 934 - DNA, 20 bp, Artificial Sequence
  Description of Artificial Sequence: Synthetic oligonucleotide
gggaggcatcctcggcctct

SEQ ID NO: 935 - DNA, 20 bp, Artificial Sequence
  Description of Artificial Sequence: Synthetic oligonucleotide
agggaggcatcctcggcctc

SEQ ID NO: 936 - DNA, 20 bp, Artificial Sequence
  Description of Artificial Sequence: Synthetic oligonucleotide
aagggaggcatcctcggcct

SEQ ID NO: 937 - DNA, 20 bp, Artificial Sequence
  Description of Artificial Sequence: Synthetic oligonucleotide
gaagggaggcatcctcggcc

SEQ ID NO: 938 - DNA, 20 bp, Artificial Sequence
  Description of Artificial Sequence: Synthetic oligonucleotide
ggtcttggtggcgtgcttca

SEQ ID NO: 939 - DNA, 20 bp, Artificial Sequence
  Description of Artificial Sequence: Synthetic oligonucleotide
gcggtcttggtggcgtgctt

SEQ ID NO: 940 - DNA, 20 bp, Artificial Sequence
  Description of Artificial Sequence: Synthetic oligonucleotide
gtctcaggcagccacggctg

SEQ ID NO: 941 - DNA, 20 bp, Artificial Sequence
  Description of Artificial Sequence: Synthetic oligonucleotide
aggccagcatgcctggaggg

SEQ ID NO: 942 - DNA, 20 bp, Artificial Sequence
  Description of Artificial Sequence: Synthetic oligonucleotide
tgcatccttggcggtcttgg

SEQ ID NO: 943 - DNA, 20 bp, Artificial Sequence
  Description of Artificial Sequence: Synthetic oligonucleotide
gtgcatccttggcggtcttg

SEQ ID NO: 944 - DNA, 20 bp, Artificial Sequence
  Description of Artificial Sequence: Synthetic oligonucleotide
ctgctgggccacctgggact

SEQ ID NO: 945 - DNA, 20 bp, Artificial Sequence
  Description of Artificial Sequence: Synthetic oligonucleotide
tgaagccatcggtcacccag

SEQ ID NO: 946 - DNA, 20 bp, Artificial Sequence
  Description of Artificial Sequence: Synthetic oligonucleotide
ctgaagccatcggtcaccca

SEQ ID NO: 947 - DNA, 20 bp, Artificial Sequence
  Description of Artificial Sequence: Synthetic oligonucleotide
cttgtccttaacggtgctcc

SEQ ID NO: 948 - DNA, 20 bp, Artificial Sequence
  Description of Artificial Sequence: Synthetic oligonucleotide
tgtccagctttattgggagg

SEQ ID NO: 949 - DNA, 20 bp, Artificial Sequence
  Description of Artificial Sequence: Synthetic oligonucleotide
tgcctctagggatgaactga

SEQ ID NO: 950 - DNA, 20 bp, Artificial Sequence
  Description of Artificial Sequence: Synthetic oligonucleotide
ctgcatggcacctctgttcc

SEQ ID NO: 951 - DNA, 20 bp, Artificial Sequence
  Description of Artificial Sequence: Synthetic oligonucleotide
gggctgcatggcacctctgt

SEQ ID NO: 952 - DNA, 20 bp, Artificial Sequence
  Description of Artificial Sequence: Synthetic oligonucleotide
ctctgaagctcgggcagagg

SEQ ID NO: 953 - DNA, 20 bp, Artificial Sequence
  Description of Artificial Sequence: Synthetic oligonucleotide
cctctgaagctcgggcagag

SEQ ID NO: 954 - DNA, 20 bp, Artificial Sequence
  Description of Artificial Sequence: Synthetic oligonucleotide
gcctctgaagctcgggcaga

SEQ ID NO: 955 - DNA, 20 bp, Artificial Sequence
  Description of Artificial Sequence: Synthetic oligonucleotide
cggcctctgaagctcgggca

SEQ ID NO: 956 - DNA, 20 bp, Artificial Sequence
  Description of Artificial Sequence: Synthetic oligonucleotide
tcggcctctgaagctcgggc

SEQ ID NO: 957 - DNA, 20 bp, Artificial Sequence
  Description of Artificial Sequence: Synthetic oligonucleotide
ctcggcctctgaagctcggg

SEQ ID NO: 958 - DNA, 20 bp, Artificial Sequence
  Description of Artificial Sequence: Synthetic oligonucleotide
cctcggcctctgaagctcgg

SEQ ID NO: 959 - DNA, 20 bp, Artificial Sequence
  Description of Artificial Sequence: Synthetic oligonucleotide
tcctcggcctctgaagctcg

SEQ ID NO: 960 - DNA, 20 bp, Artificial Sequence
  Description of Artificial Sequence: Synthetic oligonucleotide
tgctcagtgcatccttggcg

SEQ ID NO: 961 - DNA, 20 bp, Artificial Sequence
  Description of Artificial Sequence: Synthetic oligonucleotide
cctgggactcctgcacgctg

SEQ ID NO: 962 - DNA, 20 bp, Artificial Sequence
  Description of Artificial Sequence: Synthetic oligonucleotide
ccacctgggactcctgcacg

SEQ ID NO: 963 - DNA, 20 bp, Artificial Sequence
  Description of Artificial Sequence: Synthetic oligonucleotide
tcggtcacccagcccctggc

SEQ ID NO: 964 - DNA, 20 bp, Artificial Sequence
  Description of Artificial Sequence: Synthetic oligonucleotide
atcggtcacccagcccctgg

SEQ ID NO: 965 - DNA, 20 bp, Artificial Sequence
  Description of Artificial Sequence: Synthetic oligonucleotide
catcggtcacccagcccctg

SEQ ID NO: 966 - DNA, 20 bp, Artificial Sequence
  Description of Artificial Sequence: Synthetic oligonucleotide
ccatcggtcacccagcccct

SEQ ID NO: 967 - DNA, 20 bp, Artificial Sequence
  Description of Artificial Sequence: Synthetic oligonucleotide
gccatcggtcacccagcccc

SEQ ID NO: 968 - DNA, 20 bp, Artificial Sequence
  Description of Artificial Sequence: Synthetic oligonucleotide
agccatcggtcacccagccc

SEQ ID NO: 969 - DNA, 20 bp, Artificial Sequence
  Description of Artificial Sequence: Synthetic oligonucleotide
tccagctttattgggaggcc

SEQ ID NO: 970 - DNA, 20 bp, Artificial Sequence
  Description of Artificial Sequence: Synthetic oligonucleotide
catcctcggcctctgaagct

SEQ ID NO: 971 - DNA, 20 bp, Artificial Sequence
  Description of Artificial Sequence: Synthetic oligonucleotide
aggcatcctcggcctctgaa

SEQ ID NO: 972 - DNA, 20 bp, Artificial Sequence
  Description of Artificial Sequence: Synthetic oligonucleotide
tcttggtggcgtgcttcatg

SEQ ID NO: 973 - DNA, 20 bp, Artificial Sequence
  Description of Artificial Sequence: Synthetic oligonucleotide
cacgctgctcagtgcatcct

SEQ ID NO: 974 - DNA, 20 bp, Artificial Sequence
  Description of Artificial Sequence: Synthetic oligonucleotide
ctcctgcacgctgctcagtg

SEQ ID NO: 975 - DNA, 20 bp, Artificial Sequence
  Description of Artificial Sequence: Synthetic oligonucleotide
ggactcctgcacgctgctca

SEQ ID NO: 976 - DNA, 20 bp, Artificial Sequence
  Description of Artificial Sequence: Synthetic oligonucleotide
gggactcctgcacgctgctc

SEQ ID NO: 977 - DNA, 20 bp, Artificial Sequence
  Description of Artificial Sequence: Synthetic oligonucleotide
tgggactcctgcacgctgct

SEQ ID NO: 978 - DNA, 20 bp, Artificial Sequence
  Description of Artificial Sequence: Synthetic oligonucleotide
aggtctcaggcagccacggc

SEQ ID NO: 979 - DNA, 20 bp, Artificial Sequence
  Description of Artificial Sequence: Synthetic oligonucleotide
gaggtctcaggcagccacgg

SEQ ID NO: 980 - DNA, 20 bp, Artificial Sequence
  Description of Artificial Sequence: Synthetic oligonucleotide
tgaggtctcaggcagccacg

SEQ ID NO: 981 - DNA, 20 bp, Artificial Sequence
  Description of Artificial Sequence: Synthetic oligonucleotide
cctggagattgcaggaccca

SEQ ID NO: 982 - DNA, 20 bp, Artificial Sequence
  Description of Artificial Sequence: Synthetic oligonucleotide
gccctggagattgcaggacc

SEQ ID NO: 983 - DNA, 20 bp, Artificial Sequence
  Description of Artificial Sequence: Synthetic oligonucleotide
ccaggagcgccaggagggca

SEQ ID NO: 984 - DNA, 20 bp, Artificial Sequence
  Description of Artificial Sequence: Synthetic oligonucleotide
cgtgcttcatgtaaccctgc

SEQ ID NO: 985 - DNA, 20 bp, Artificial Sequence
  Description of Artificial Sequence: Synthetic oligonucleotide
tggtctgacctcagggtcca

SEQ ID NO: 986 - DNA, 20 bp, Artificial Sequence
  Description of Artificial Sequence: Synthetic oligonucleotide
ttggtctgacctcagggtcc

SEQ ID NO: 987 - DNA, 20 bp, Artificial Sequence
  Description of Artificial Sequence: Synthetic oligonucleotide
aagttggtctgacctcaggg

SEQ ID NO: 988 - DNA, 20 bp, Artificial Sequence
  Description of Artificial Sequence: Synthetic oligonucleotide
tgaagttggtctgacctcag

SEQ ID NO: 989 - DNA, 20 bp, Artificial Sequence
  Description of Artificial Sequence: Synthetic oligonucleotide
cacggctgaagttggtctga

SEQ ID NO: 990 - DNA, 20 bp, Artificial Sequence
  Description of Artificial Sequence: Synthetic oligonucleotide
ccacggctgaagttggtctg

SEQ ID NO: 991 - DNA, 20 bp, Artificial Sequence
  Description of Artificial Sequence: Synthetic oligonucleotide
gccacggctgaagttggtct

SEQ ID NO: 992 - DNA, 20 bp, Artificial Sequence
  Description of Artificial Sequence: Synthetic oligonucleotide
agccacggctgaagttggtc

SEQ ID NO: 993 - DNA, 20 bp, Artificial Sequence
  Description of Artificial Sequence: Synthetic oligonucleotide
gtcttggtggcgtgcttcat

SEQ ID NO: 994 - DNA, 20 bp, Artificial Sequence
  Description of Artificial Sequence: Synthetic oligonucleotide
cagtgcatccttggcggtct

SEQ ID NO: 995 - DNA, 20 bp, Artificial Sequence
  Description of Artificial Sequence: Synthetic oligonucleotide
ctgcctctagggatgaactg

SEQ ID NO: 996 - DNA, 20 bp, Artificial Sequence
  Description of Artificial Sequence: Synthetic oligonucleotide
ggcatcctcggcctctgaag

SEQ ID NO: 997 - DNA, 20 bp, Artificial Sequence
  Description of Artificial Sequence: Synthetic oligonucleotide
ttggtggcgtgcttcatgta

SEQ ID NO: 998 - DNA, 20 bp, Artificial Sequence
  Description of Artificial Sequence: Synthetic oligonucleotide
gcgtgcttcatgtaaccctg

SEQ ID NO: 999 - DNA, 20 bp, Artificial Sequence
  Description of Artificial Sequence: Synthetic oligonucleotide
tgagaagggaggcatcctcg

SEQ ID NO: 1000 - DNA, 20 bp, Artificial Sequence
  Description of Artificial Sequence: Synthetic oligonucleotide
gctgaagttggtctgacctc

SEQ ID NO: 1001 - DNA, 20 bp, Artificial Sequence
  Description of Artificial Sequence: Synthetic oligonucleotide
gggcctcccaaggcaaaccc

SEQ ID NO: 1002 - DNA, 20 bp, Artificial Sequence
  Description of Artificial Sequence: Synthetic oligonucleotide
gtttatgcccctgggcctga

SEQ ID NO: 1003 - DNA, 20 bp, Artificial Sequence
  Description of Artificial Sequence: Synthetic oligonucleotide
aaccttagctgggtctgcca

SEQ ID NO: 1004 - DNA, 20 bp, Artificial Sequence
  Description of Artificial Sequence: Synthetic oligonucleotide
cacccattgggactgggatc

SEQ ID NO: 1005 - DNA, 20 bp, Artificial Sequence
  Description of Artificial Sequence: Synthetic oligonucleotide
ctcctgcttgaccacccatt

SEQ ID NO: 1006 - DNA, 20 bp, Artificial Sequence
  Description of Artificial Sequence: Synthetic oligonucleotide
gctcctgcttgaccacccat

SEQ ID NO: 1007 - DNA, 20 bp, Artificial Sequence
  Description of Artificial Sequence: Synthetic oligonucleotide
tgggctcctgcttgaccacc

SEQ ID NO: 1008 - DNA, 20 bp, Artificial Sequence
  Description of Artificial Sequence: Synthetic oligonucleotide
gcctgacaaaggccctgtga

SEQ ID NO: 1009 - DNA, 20 bp, Artificial Sequence
  Description of Artificial Sequence: Synthetic oligonucleotide
tccttgcaggaaccccagca

SEQ ID NO: 1010 - DNA, 20 bp, Artificial Sequence
  Description of Artificial Sequence: Synthetic oligonucleotide
acaccaccctctcaacttca

SEQ ID NO: 1011 - DNA, 20 bp, Artificial Sequence
  Description of Artificial Sequence: Synthetic oligonucleotide
acacccatgtccccactgga

SEQ ID NO: 1012 - DNA, 20 bp, Artificial Sequence
  Description of Artificial Sequence: Synthetic oligonucleotide
tgagaactcctctgtaggca

SEQ ID NO: 1013 - DNA, 20 bp, Artificial Sequence
  Description of Artificial Sequence: Synthetic oligonucleotide
ggagcagctgcctctaggga

SEQ ID NO: 1014 - DNA, 20 bp, Artificial Sequence
  Description of Artificial Sequence: Synthetic oligonucleotide
  Description of Combined DNA/RNA Molecule: Synthetic oligonucleotide
uggagcagctgcctctaggg

SEQ ID NO: 1015 - DNA, 20 bp, Artificial Sequence
  Description of Artificial Sequence: Synthetic oligonucleotide
  Description of Combined DNA/RNA Molecule: Synthetic oligonucleotide
uguucctggagcagctgcct

SEQ ID NO: 1016 - DNA, 20 bp, Artificial Sequence
  Description of Artificial Sequence: Synthetic oligonucleotide
  Description of Combined DNA/RNA Molecule: Synthetic oligonucleotide
uccuuggcggtcttggtggc

SEQ ID NO: 1017 - DNA, 20 bp, Artificial Sequence
  Description of Artificial Sequence: Synthetic oligonucleotide
  Description of Combined DNA/RNA Molecule: Synthetic oligonucleotide
auccutggcggtcttggtgg

SEQ ID NO: 1018 - DNA, 20 bp, Artificial Sequence
  Description of Artificial Sequence: Synthetic oligonucleotide
  Description of Combined DNA/RNA Molecule: Synthetic oligonucleotide
cauccttggcggtcttggtg

SEQ ID NO: 1019 - DNA, 20 bp, Artificial Sequence
  Description of Artificial Sequence: Synthetic oligonucleotide
  Description of Combined DNA/RNA Molecule: Synthetic oligonucleotide
gcauccttggcggtcttggt

SEQ ID NO: 1020 - DNA, 20 bp, Artificial Sequence
  Description of Artificial Sequence: Synthetic oligonucleotide
  Description of Combined DNA/RNA Molecule: Synthetic oligonucleotide
cuggcctgctgggccacctg

SEQ ID NO: 1021 - DNA, 20 bp, Artificial Sequence
  Description of Artificial Sequence: Synthetic oligonucleotide
ggcggtcttggtggcgtgct

SEQ ID NO: 1022 - DNA, 20 bp, Artificial Sequence
  Description of Artificial Sequence: Synthetic oligonucleotide
  Description of Combined DNA/RNA Molecule: Synthetic oligonucleotide
uggcggtcttggtggcgtgc

SEQ ID NO: 1023 - DNA, 20 bp, Artificial Sequence
  Description of Artificial Sequence: Synthetic oligonucleotide
  Description of Combined DNA/RNA Molecule: Synthetic oligonucleotide
uuggcggtcttggtggcgtg

SEQ ID NO: 1024 - DNA, 20 bp, Artificial Sequence
  Description of Artificial Sequence: Synthetic oligonucleotide
  Description of Combined DNA/RNA Molecule: Synthetic oligonucleotide
cuuggcggtcttggtggcgt

SEQ ID NO: 1025 - DNA, 20 bp, Artificial Sequence
  Description of Artificial Sequence: Synthetic oligonucleotide
  Description of Combined DNA/RNA Molecule: Synthetic oligonucleotide
ccuuggcggtcttggtggcg

SEQ ID NO: 1026 - DNA, 20 bp, Artificial Sequence
  Description of Artificial Sequence: Synthetic oligonucleotide
gcccctggcctgctgggcca

SEQ ID NO: 1027 - DNA, 20 bp, Artificial Sequence
  Description of Artificial Sequence: Synthetic oligonucleotide
ggcagaggccaggagcgcca

SEQ ID NO: 1028 - DNA, 20 bp, Artificial Sequence
  Description of Artificial Sequence: Synthetic oligonucleotide
gaggcatcctcggcctctga

SEQ ID NO: 1029 - DNA, 20 bp, Artificial Sequence
  Description of Artificial Sequence: Synthetic oligonucleotide
ggaggcatcctcggcctctg

SEQ ID NO: 1030 - DNA, 20 bp, Artificial Sequence
  Description of Artificial Sequence: Synthetic oligonucleotide
gggaggcatcctcggcctct

SEQ ID NO: 1031 - DNA, 20 bp, Artificial Sequence
  Description of Artificial Sequence: Synthetic oligonucleotide
agggaggcatcctcggcctc

SEQ ID NO: 1032 - DNA, 20 bp, Artificial Sequence
  Description of Artificial Sequence: Synthetic oligonucleotide
aagggaggcatcctcggcct

SEQ ID NO: 1033 - DNA, 20 bp, Artificial Sequence
  Description of Artificial Sequence: Synthetic oligonucleotide
gaagggaggcatcctcggcc

SEQ ID NO: 1034 - DNA, 20 bp, Artificial Sequence
  Description of Artificial Sequence: Synthetic oligonucleotide
  Description of Combined DNA/RNA Molecule: Synthetic oligonucleotide
ggucutggtggcgtgcttca

SEQ ID NO: 1035 - DNA, 20 bp, Artificial Sequence
  Description of Artificial Sequence: Synthetic oligonucleotide
  Description of Combined DNA/RNA Molecule: Synthetic oligonucleotide
gcggucttggtggcgtgctt

SEQ ID NO: 1036 - DNA, 20 bp, Artificial Sequence
  Description of Artificial Sequence: Synthetic oligonucleotide
  Description of Combined DNA/RNA Molecule: Synthetic oligonucleotide
gucucaggcagccacggctg

SEQ ID NO: 1037 - DNA, 20 bp, Artificial Sequence
  Description of Artificial Sequence: Synthetic oligonucleotide
aggccagcatgcctggaggg

SEQ ID NO: 1038 - DNA, 20 bp, Artificial Sequence
  Description of Artificial Sequence: Synthetic oligonucleotide
  Description of Combined DNA/RNA Molecule: Synthetic oligonucleotide
ugcauccttggcggtcttgg

SEQ ID NO: 1039 - DNA, 20 bp, Artificial Sequence
  Description of Artificial Sequence: Synthetic oligonucleotide
  Description of Combined DNA/RNA Molecule: Synthetic oligonucleotide
gugcatccttggcggtcttg

SEQ ID NO: 1040 - DNA, 20 bp, Artificial Sequence
  Description of Artificial Sequence: Synthetic oligonucleotide
  Description of Combined DNA/RNA Molecule: Synthetic oligonucleotide
cugcugggccacctgggact

SEQ ID NO: 1041 - DNA, 20 bp, Artificial Sequence
  Description of Artificial Sequence: Synthetic oligonucleotide
  Description of Combined DNA/RNA Molecule: Synthetic oligonucleotide
ugaagccatcggtcacccag

SEQ ID NO: 1042 - DNA, 20 bp, Artificial Sequence
  Description of Artificial Sequence: Synthetic oligonucleotide
  Description of Combined DNA/RNA Molecule: Synthetic oligonucleotide
cugaagccatcggtcaccca

SEQ ID NO: 1043 - DNA, 20 bp, Artificial Sequence
  Description of Artificial Sequence: Synthetic oligonucleotide
  Description of Combined DNA/RNA Molecule: Synthetic oligonucleotide
cuuguccttaacggtgctcc

SEQ ID NO: 1044 - DNA, 20 bp, Artificial Sequence
  Description of Artificial Sequence: Synthetic oligonucleotide
  Description of Combined DNA/RNA Molecule: Synthetic oligonucleotide
uguccagctttattgggagg

SEQ ID NO: 1045 - DNA, 20 bp, Artificial Sequence
  Description of Artificial Sequence: Synthetic oligonucleotide
  Description of Combined DNA/RNA Molecule: Synthetic oligonucleotide
ugccuctagggatgaactga

SEQ ID NO: 1046 - DNA, 20 bp, Artificial Sequence
  Description of Artificial Sequence: Synthetic oligonucleotide
  Description of Combined DNA/RNA Molecule: Synthetic oligonucleotide
cugcatggcacctctgttcc

SEQ ID NO: 1047 - DNA, 20 bp, Artificial Sequence
  Description of Artificial Sequence: Synthetic oligonucleotide
  Description of Combined DNA/RNA Molecule: Synthetic oligonucleotide
gggcugcatggcacctctgt

SEQ ID NO: 1048 - DNA, 20 bp, Artificial Sequence
  Description of Artificial Sequence: Synthetic oligonucleotide
  Description of Combined DNA/RNA Molecule: Synthetic oligonucleotide
cucugaagctcgggcagagg

SEQ ID NO: 1049 - DNA, 20 bp, Artificial Sequence
  Description of Artificial Sequence: Synthetic oligonucleotide
  Description of Combined DNA/RNA Molecule: Synthetic oligonucleotide
ccucugaagctcgggcagag

SEQ ID NO: 1050 - DNA, 20 bp, Artificial Sequence
  Description of Artificial Sequence: Synthetic oligonucleotide
  Description of Combined DNA/RNA Molecule: Synthetic oligonucleotide
gccuctgaagctcgggcaga

SEQ ID NO: 1051 - DNA, 20 bp, Artificial Sequence
  Description of Artificial Sequence: Synthetic oligonucleotide
cggcctctgaagctcgggca

SEQ ID NO: 1052 - DNA, 20 bp, Artificial Sequence
  Description of Artificial Sequence: Synthetic oligonucleotide
  Description of Combined DNA/RNA Molecule: Synthetic oligonucleotide
ucggcctctgaagctcgggc

SEQ ID NO: 1053 - DNA, 20 bp, Artificial Sequence
  Description of Artificial Sequence: Synthetic oligonucleotide
  Description of Combined DNA/RNA Molecule: Synthetic oligonucleotide
cucggcctctgaagctcggg

SEQ ID NO: 1054 - DNA, 20 bp, Artificial Sequence
  Description of Artificial Sequence: Synthetic oligonucleotide
  Description of Combined DNA/RNA Molecule: Synthetic oligonucleotide
ccucggcctctgaagctcgg

SEQ ID NO: 1055 - DNA, 20 bp, Artificial Sequence
  Description of Artificial Sequence: Synthetic oligonucleotide
  Description of Combined DNA/RNA Molecule: Synthetic oligonucleotide
uccucggcctctgaagctcg

SEQ ID NO: 1056 - DNA, 20 bp, Artificial Sequence
  Description of Artificial Sequence: Synthetic oligonucleotide
  Description of Combined DNA/RNA Molecule: Synthetic oligonucleotide
ugcucagtgcatccttggcg

SEQ ID NO: 1057 - DNA, 20 bp, Artificial Sequence
  Description of Artificial Sequence: Synthetic oligonucleotide
  Description of Combined DNA/RNA Molecule: Synthetic oligonucleotide
ccugggactcctgcacgctg

SEQ ID NO: 1058 - DNA, 20 bp, Artificial Sequence
  Description of Artificial Sequence: Synthetic oligonucleotide
ccacctgggactcctgcacg

SEQ ID NO: 1059 - DNA, 20 bp, Artificial Sequence
  Description of Artificial Sequence: Synthetic oligonucleotide
  Description of Combined DNA/RNA Molecule: Synthetic oligonucleotide
ucggucacccagcccctggc

SEQ ID NO: 1060 - DNA, 20 bp, Artificial Sequence
  Description of Artificial Sequence: Synthetic oligonucleotide
  Description of Combined DNA/RNA Molecule: Synthetic oligonucleotide
aucggtcacccagcccctgg

SEQ ID NO: 1061 - DNA, 20 bp, Artificial Sequence
  Description of Artificial Sequence: Synthetic oligonucleotide
  Description of Combined DNA/RNA Molecule: Synthetic oligonucleotide
caucggtcacccagcccctg

SEQ ID NO: 1062 - DNA, 20 bp, Artificial Sequence
  Description of Artificial Sequence: Synthetic oligonucleotide
  Description of Combined DNA/RNA Molecule: Synthetic oligonucleotide
ccaucggtcacccagcccct

SEQ ID NO: 1063 - DNA, 20 bp, Artificial Sequence
  Description of Artificial Sequence: Synthetic oligonucleotide
  Description of Combined DNA/RNA Molecule: Synthetic oligonucleotide
gccaucggtcacccagcccc

SEQ ID NO: 1064 - DNA, 20 bp, Artificial Sequence
  Description of Artificial Sequence: Synthetic oligonucleotide
agccatcggtcacccagccc

SEQ ID NO: 1065 - DNA, 20 bp, Artificial Sequence
  Description of Artificial Sequence: Synthetic oligonucleotide
  Description of Combined DNA/RNA Molecule: Synthetic oligonucleotide
uccagctttattgggaggcc

SEQ ID NO: 1066 - DNA, 20 bp, Artificial Sequence
  Description of Artificial Sequence: Synthetic oligonucleotide
  Description of Combined DNA/RNA Molecule: Synthetic oligonucleotide
caucctcggcctctgaagct

SEQ ID NO: 1067 - DNA, 20 bp, Artificial Sequence
  Description of Artificial Sequence: Synthetic oligonucleotide
aggcatcctcggcctctgaa

SEQ ID NO: 1068 - DNA, 20 bp, Artificial Sequence
  Description of Artificial Sequence: Synthetic oligonucleotide
  Description of Combined DNA/RNA Molecule: Synthetic oligonucleotide
ucuuggtggcgtgcttcatg

SEQ ID NO: 1069 - DNA, 20 bp, Artificial Sequence
  Description of Artificial Sequence: Synthetic oligonucleotide
cacgctgctcagtgcatcct

SEQ ID NO: 1070 - DNA, 20 bp, Artificial Sequence
  Description of Artificial Sequence: Synthetic oligonucleotide
  Description of Combined DNA/RNA Molecule: Synthetic oligonucleotide
cuccugcacgctgctcagtg

SEQ ID NO: 1071 - DNA, 20 bp, Artificial Sequence
  Description of Artificial Sequence: Synthetic oligonucleotide
  Description of Combined DNA/RNA Molecule: Synthetic oligonucleotide
ggacucctgcacgctgctca

SEQ ID NO: 1072 - DNA, 20 bp, Artificial Sequence
  Description of Artificial Sequence: Synthetic oligonucleotide
gggactcctgcacgctgctc

SEQ ID NO: 1073 - DNA, 20 bp, Artificial Sequence
  Description of Artificial Sequence: Synthetic oligonucleotide
  Description of Combined DNA/RNA Molecule: Synthetic oligonucleotide
ugggactcctgcacgctgct

SEQ ID NO: 1074 - DNA, 20 bp, Artificial Sequence
  Description of Artificial Sequence: Synthetic oligonucleotide
  Description of Combined DNA/RNA Molecule: Synthetic oligonucleotide
agguctcaggcagccacggc

SEQ ID NO: 1075 - DNA, 20 bp, Artificial Sequence
  Description of Artificial Sequence: Synthetic oligonucleotide
  Description of Combined DNA/RNA Molecule: Synthetic oligonucleotide
gagguctcaggcagccacgg

SEQ ID NO: 1076 - DNA, 20 bp, Artificial Sequence
  Description of Artificial Sequence: Synthetic oligonucleotide
  Description of Combined DNA/RNA Molecule: Synthetic oligonucleotide
ugaggtctcaggcagccacg

SEQ ID NO: 1077 - DNA, 20 bp, Artificial Sequence
  Description of Artificial Sequence: Synthetic oligonucleotide
  Description of Combined DNA/RNA Molecule: Synthetic oligonucleotide
ccuggagattgcaggaccca

SEQ ID NO: 1078 - DNA, 20 bp, Artificial Sequence
  Description of Artificial Sequence: Synthetic oligonucleotide
  Description of Combined DNA/RNA Molecule: Synthetic oligonucleotide
gcccuggagattgcaggacc

SEQ ID NO: 1079 - DNA, 20 bp, Artificial Sequence
  Description of Artificial Sequence: Synthetic oligonucleotide
ccaggagcgccaggagggca

SEQ ID NO: 1080 - DNA, 20 bp, Artificial Sequence
  Description of Artificial Sequence: Synthetic oligonucleotide
  Description of Combined DNA/RNA Molecule: Synthetic oligonucleotide
cgugcttcatgtaaccctgc

SEQ ID NO: 1081 - DNA, 20 bp, Artificial Sequence
  Description of Artificial Sequence: Synthetic oligonucleotide
  Description of Combined DNA/RNA Molecule: Synthetic oligonucleotide
ugguctgacctcagggtcca

SEQ ID NO: 1082 - DNA, 20 bp, Artificial Sequence
  Description of Artificial Sequence: Synthetic oligonucleotide
  Description of Combined DNA/RNA Molecule: Synthetic oligonucleotide
uugguctgacctcagggtcc

SEQ ID NO: 1083 - DNA, 20 bp, Artificial Sequence
  Description of Artificial Sequence: Synthetic oligonucleotide
  Description of Combined DNA/RNA Molecule: Synthetic oligonucleotide
aaguuggtctgacctcaggg

SEQ ID NO: 1084 - DNA, 20 bp, Artificial Sequence
  Description of Artificial Sequence: Synthetic oligonucleotide
  Description of Combined DNA/RNA Molecule: Synthetic oligonucleotide
ugaagttggtctgacctcag

SEQ ID NO: 1085 - DNA, 20 bp, Artificial Sequence
  Description of Artificial Sequence: Synthetic oligonucleotide
cacggctgaagttggtctga

SEQ ID NO: 1086 - DNA, 20 bp, Artificial Sequence
  Description of Artificial Sequence: Synthetic oligonucleotide
ccacggctgaagttggtctg

SEQ ID NO: 1087 - DNA, 20 bp, Artificial Sequence
  Description of Artificial Sequence: Synthetic oligonucleotide
gccacggctgaagttggtct

SEQ ID NO: 1088 - DNA, 20 bp, Artificial Sequence
  Description of Artificial Sequence: Synthetic oligonucleotide
agccacggctgaagttggtc

SEQ ID NO: 1089 - DNA, 20 bp, Artificial Sequence
  Description of Artificial Sequence: Synthetic oligonucleotide
  Description of Combined DNA/RNA Molecule: Synthetic oligonucleotide
gucuuggtggcgtgcttcat

SEQ ID NO: 1090 - DNA, 20 bp, Artificial Sequence
  Description of Artificial Sequence: Synthetic oligonucleotide
  Description of Combined DNA/RNA Molecule: Synthetic oligonucleotide
cagugcatccttggcggtct

SEQ ID NO: 1091 - DNA, 20 bp, Artificial Sequence
  Description of Artificial Sequence: Synthetic oligonucleotide
  Description of Combined DNA/RNA Molecule: Synthetic oligonucleotide
cugcctctagggatgaactg

SEQ ID NO: 1092 - DNA, 20 bp, Artificial Sequence
  Description of Artificial Sequence: Synthetic oligonucleotide
  Description of Combined DNA/RNA Molecule: Synthetic oligonucleotide
ggcaucctcggcctctgaag

SEQ ID NO: 1093 - DNA, 20 bp, Artificial Sequence
  Description of Artificial Sequence: Synthetic oligonucleotide
  Description of Combined DNA/RNA Molecule: Synthetic oligonucleotide
uugguggcgtgcttcatgta

SEQ ID NO: 1094 - DNA, 20 bp, Artificial Sequence
  Description of Artificial Sequence: Synthetic oligonucleotide
  Description of Combined DNA/RNA Molecule: Synthetic oligonucleotide
gcgugcttcatgtaaccctg

SEQ ID NO: 1095 - DNA, 20 bp, Artificial Sequence
  Description of Artificial Sequence: Synthetic oligonucleotide
  Description of Combined DNA/RNA Molecule: Synthetic oligonucleotide
ugagaagggaggcatcctcg

SEQ ID NO: 1096 - DNA, 20 bp, Artificial Sequence
  Description of Artificial Sequence: Synthetic oligonucleotide
  Description of Combined DNA/RNA Molecule: Synthetic oligonucleotide
gcugaagttggtctgacctc

SEQ ID NO: 1097 - DNA, 20 bp, Artificial Sequence
  Description of Artificial Sequence: Synthetic oligonucleotide
gggcctcccaaggcaaaccc

SEQ ID NO: 1098 - DNA, 20 bp, Artificial Sequence
  Description of Artificial Sequence: Synthetic oligonucleotide
  Description of Combined DNA/RNA Molecule: Synthetic oligonucleotide
guuuatgcccctgggcctga

SEQ ID NO: 1099 - DNA, 20 bp, Artificial Sequence
  Description of Artificial Sequence: Synthetic oligonucleotide
  Description of Combined DNA/RNA Molecule: Synthetic oligonucleotide
aaccutagctgggtctgcca

SEQ ID NO: 1100 - DNA, 20 bp, Artificial Sequence
  Description of Artificial Sequence: Synthetic oligonucleotide
cacccattgggactgggatc

SEQ ID NO: 1101 - DNA, 20 bp, Artificial Sequence
  Description of Artificial Sequence: Synthetic oligonucleotide
  Description of Combined DNA/RNA Molecule: Synthetic oligonucleotide
cuccugcttgaccacccatt

SEQ ID NO: 1102 - DNA, 20 bp, Artificial Sequence
  Description of Artificial Sequence: Synthetic oligonucleotide
  Description of Combined DNA/RNA Molecule: Synthetic oligonucleotide
gcucctgcttgaccacccat

SEQ ID NO: 1103 - DNA, 20 bp, Artificial Sequence
  Description of Artificial Sequence: Synthetic oligonucleotide
  Description of Combined DNA/RNA Molecule: Synthetic oligonucleotide
ugggctcctgcttgaccacc

SEQ ID NO: 1104 - DNA, 20 bp, Artificial Sequence
  Description of Artificial Sequence: Synthetic oligonucleotide
  Description of Combined DNA/RNA Molecule: Synthetic oligonucleotide
gccugacaaaggccctgtga

SEQ ID NO: 1105 - RNA, 20 nt, Artificial Sequence
  Description of Artificial Sequence: Synthetic oligonucleotide
uccuugcaggaaccccagca

SEQ ID NO: 1106 - DNA, 20 bp, Artificial Sequence
  Description of Artificial Sequence: Synthetic oligonucleotide
acaccaccctctcaacttca

SEQ ID NO: 1107 - DNA, 20 bp, Artificial Sequence
  Description of Artificial Sequence: Synthetic oligonucleotide
acacccatgtccccactgga

SEQ ID NO: 1108 - DNA, 20 bp, Artificial Sequence
  Description of Artificial Sequence: Synthetic oligonucleotide
  Description of Combined DNA/RNA Molecule: Synthetic oligonucleotide
ugagaactcctctgtaggca

SEQ ID NO: 1109 - DNA, 20 bp, Artificial Sequence
  Description of Artificial Sequence: Synthetic oligonucleotide
  Description of Combined DNA/RNA Molecule: Synthetic oligonucleotide
uccuuggcggtcttgguggc

SEQ ID NO: 1110 - DNA, 20 bp, Artificial Sequence
  Description of Artificial Sequence: Synthetic oligonucleotide
  Description of Combined DNA/RNA Molecule: Synthetic oligonucleotide
auccutggcggtcttggugg

SEQ ID NO: 1111 - DNA, 20 bp, Artificial Sequence
  Description of Artificial Sequence: Synthetic oligonucleotide
  Description of Combined DNA/RNA Molecule: Synthetic oligonucleotide
gcauccttggcggtcuuggu

SEQ ID NO: 1112 - DNA, 20 bp, Artificial Sequence
  Description of Artificial Sequence: Synthetic oligonucleotide
  Description of Combined DNA/RNA Molecule: Synthetic oligonucleotide
cuggcctgctgggccaccug

SEQ ID NO: 1113 - DNA, 20 bp, Artificial Sequence
  Description of Artificial Sequence: Synthetic oligonucleotide
  Description of Combined DNA/RNA Molecule: Synthetic oligonucleotide
ggcggtcttggtggcgugcu

SEQ ID NO: 1114 - DNA, 20 bp, Artificial Sequence
  Description of Artificial Sequence: Synthetic oligonucleotide
  Description of Combined DNA/RNA Molecule: Synthetic oligonucleotide
uggcggtcttggtggcgugc

SEQ ID NO: 1115 - DNA, 20 bp, Artificial Sequence
  Description of Artificial Sequence: Synthetic oligonucleotide
  Description of Combined DNA/RNA Molecule: Synthetic oligonucleotide
cuuggcggtcttggtggcgu

SEQ ID NO: 1116 - DNA, 20 bp, Artificial Sequence
  Description of Artificial Sequence: Synthetic oligonucleotide
  Description of Combined DNA/RNA Molecule: Synthetic oligonucleotide
ccuuggcggtcttgguggcg

SEQ ID NO: 1117 - DNA, 20 bp, Artificial Sequence
  Description of Artificial Sequence: Synthetic oligonucleotide
ggcagaggccaggagcgcca

SEQ ID NO: 1118 - DNA, 20 bp, Artificial Sequence
  Description of Artificial Sequence: Synthetic oligonucleotide
  Description of Combined DNA/RNA Molecule: Synthetic oligonucleotide
gggaggcatcctcggccucu

SEQ ID NO: 1119 - DNA, 20 bp, Artificial Sequence
  Description of Artificial Sequence: Synthetic oligonucleotide
  Description of Combined DNA/RNA Molecule: Synthetic oligonucleotide
aagggaggcatcctcggccu

SEQ ID NO: 1120 - DNA, 20 bp, Artificial Sequence
  Description of Artificial Sequence: Synthetic oligonucleotide
gaagggaggcatcctcggcc

SEQ ID NO: 1121 - DNA, 20 bp, Artificial Sequence
  Description of Artificial Sequence: Synthetic oligonucleotide
  Description of Combined DNA/RNA Molecule: Synthetic oligonucleotide
gcggucttggtggcgugcuu

SEQ ID NO: 1122 - RNA, 20 nt, Artificial Sequence
  Description of Artificial Sequence: Synthetic oligonucleotide
gucucaggcagccacggcug

SEQ ID NO: 1123 - DNA, 20 bp, Artificial Sequence
  Description of Artificial Sequence: Synthetic oligonucleotide
  Description of Combined DNA/RNA Molecule: Synthetic oligonucleotide
ugcauccttggcggtcuugg

SEQ ID NO: 1124 - DNA, 20 bp, Artificial Sequence
  Description of Artificial Sequence: Synthetic oligonucleotide
  Description of Combined DNA/RNA Molecule: Synthetic oligonucleotide
cugcugggccacctgggacu

SEQ ID NO: 1125 - DNA, 20 bp, Artificial Sequence
  Description of Artificial Sequence: Synthetic oligonucleotide
  Description of Combined DNA/RNA Molecule: Synthetic oligonucleotide
ugaagccatcggtcacccag

SEQ ID NO: 1126 - DNA, 20 bp, Artificial Sequence
  Description of Artificial Sequence: Synthetic oligonucleotide
  Description of Combined DNA/RNA Molecule: Synthetic oligonucleotide
cuuguccttaacggtgcucc

SEQ ID NO: 1127 - DNA, 20 bp, Artificial Sequence
  Description of Artificial Sequence: Synthetic oligonucleotide
  Description of Combined DNA/RNA Molecule: Synthetic oligonucleotide
uguccagctttattgggagg

SEQ ID NO: 1128 - DNA, 20 bp, Artificial Sequence
  Description of Artificial Sequence: Synthetic oligonucleotide
  Description of Combined DNA/RNA Molecule: Synthetic oligonucleotide
cugcatggcacctctguucc

SEQ ID NO: 1129 - DNA, 20 bp, Artificial Sequence
  Description of Artificial Sequence: Synthetic oligonucleotide
  Description of Combined DNA/RNA Molecule: Synthetic oligonucleotide
ugcucagtgcatcctuggcg

SEQ ID NO: 1130 - DNA, 20 bp, Artificial Sequence
  Description of Artificial Sequence: Synthetic oligonucleotide
  Description of Combined DNA/RNA Molecule: Synthetic oligonucleotide
ccugggactcctgcacgcug

SEQ ID NO: 1131 - RNA, 20 nt, Artificial Sequence
  Description of Artificial Sequence: Synthetic oligonucleotide
ucggucacccagccccuggc

SEQ ID NO: 1132 - DNA, 20 bp, Artificial Sequence
  Description of Artificial Sequence: Synthetic oligonucleotide
  Description of Combined DNA/RNA Molecule: Synthetic oligonucleotide
aucggtcacccagccccugg

SEQ ID NO: 1133 - DNA, 20 bp, Artificial Sequence
  Description of Artificial Sequence: Synthetic oligonucleotide
  Description of Combined DNA/RNA Molecule: Synthetic oligonucleotide
caucggtcacccagccccug

SEQ ID NO: 1134 - DNA, 20 bp, Artificial Sequence
  Description of Artificial Sequence: Synthetic oligonucleotide
  Description of Combined DNA/RNA Molecule: Synthetic oligonucleotide
ccaucggtcacccagccccu

SEQ ID NO: 1135 - DNA, 20 bp, Artificial Sequence
  Description of Artificial Sequence: Synthetic oligonucleotide
  Description of Combined DNA/RNA Molecule: Synthetic oligonucleotide
gccaucggtcacccagcccc

SEQ ID NO: 1136 - DNA, 20 bp, Artificial Sequence
  Description of Artificial Sequence: Synthetic oligonucleotide
agccatcggtcacccagccc

SEQ ID NO: 1137 - DNA, 20 bp, Artificial Sequence
  Description of Artificial Sequence: Synthetic oligonucleotide
  Description of Combined DNA/RNA Molecule: Synthetic oligonucleotide
uccagctttattgggaggcc

SEQ ID NO: 1138 - DNA, 20 bp, Artificial Sequence
  Description of Artificial Sequence: Synthetic oligonucleotide
  Description of Combined DNA/RNA Molecule: Synthetic oligonucleotide
cacgctgctcagtgcauccu

SEQ ID NO: 1139 - DNA, 20 bp, Artificial Sequence
  Description of Artificial Sequence: Synthetic oligonucleotide
  Description of Combined DNA/RNA Molecule: Synthetic oligonucleotide
cuccugcacgctgctcagug

SEQ ID NO: 1140 - DNA, 20 bp, Artificial Sequence
  Description of Artificial Sequence: Synthetic oligonucleotide
  Description of Combined DNA/RNA Molecule: Synthetic oligonucleotide
gggactcctgcacgcugcuc

SEQ ID NO: 1141 - DNA, 20 bp, Artificial Sequence
  Description of Artificial Sequence: Synthetic oligonucleotide
  Description of Combined DNA/RNA Molecule: Synthetic oligonucleotide
ugggactcctgcacgcugcu

SEQ ID NO: 1142 - DNA, 20 bp, Artificial Sequence
  Description of Artificial Sequence: Synthetic oligonucleotide
  Description of Combined DNA/RNA Molecule: Synthetic oligonucleotide
agguctcaggcagccacggc

SEQ ID NO: 1143 - DNA, 20 bp, Artificial Sequence
  Description of Artificial Sequence: Synthetic oligonucleotide
  Description of Combined DNA/RNA Molecule: Synthetic oligonucleotide
gagguctcaggcagccacgg

SEQ ID NO: 1144 - DNA, 20 bp, Artificial Sequence
  Description of Artificial Sequence: Synthetic oligonucleotide
  Description of Combined DNA/RNA Molecule: Synthetic oligonucleotide
ugaggtctcaggcagccacg

SEQ ID NO: 1145 - DNA, 20 bp, Artificial Sequence
  Description of Artificial Sequence: Synthetic oligonucleotide
  Description of Combined DNA/RNA Molecule: Synthetic oligonucleotide
ccuggagattgcaggaccca

SEQ ID NO: 1146 - DNA, 20 bp, Artificial Sequence
  Description of Artificial Sequence: Synthetic oligonucleotide
  Description of Combined DNA/RNA Molecule: Synthetic oligonucleotide
gcccuggagattgcaggacc

SEQ ID NO: 1147 - DNA, 20 bp, Artificial Sequence
  Description of Artificial Sequence: Synthetic oligonucleotide
  Description of Combined DNA/RNA Molecule: Synthetic oligonucleotide
cgugcttcatgtaacccugc

SEQ ID NO: 1148 - DNA, 20 bp, Artificial Sequence
  Description of Artificial Sequence: Synthetic oligonucleotide
  Description of Combined DNA/RNA Molecule: Synthetic oligonucleotide
ugguctgacctcagggucca

SEQ ID NO: 1149 - DNA, 20 bp, Artificial Sequence
  Description of Artificial Sequence: Synthetic oligonucleotide
  Description of Combined DNA/RNA Molecule: Synthetic oligonucleotide
aaguuggtctgacctcaggg

SEQ ID NO: 1150 - DNA, 20 bp, Artificial Sequence
  Description of Artificial Sequence: Synthetic oligonucleotide
  Description of Combined DNA/RNA Molecule: Synthetic oligonucleotide
ccacggctgaagttggucug

SEQ ID NO: 1151 - DNA, 20 bp, Artificial Sequence
  Description of Artificial Sequence: Synthetic oligonucleotide
  Description of Combined DNA/RNA Molecule: Synthetic oligonucleotide
agccacggctgaagtugguc

SEQ ID NO: 1152 - DNA, 20 bp, Artificial Sequence
  Description of Artificial Sequence: Synthetic oligonucleotide
  Description of Combined DNA/RNA Molecule: Synthetic oligonucleotide
gucuuggtggcgtgcuucau

SEQ ID NO: 1153 - DNA, 20 bp, Artificial Sequence
  Description of Artificial Sequence: Synthetic oligonucleotide
  Description of Combined DNA/RNA Molecule: Synthetic oligonucleotide
gcgugcttcatgtaacccug

SEQ ID NO: 1154 - DNA, 20 bp, Artificial Sequence
  Description of Artificial Sequence: Synthetic oligonucleotide
  Description of Combined DNA/RNA Molecule: Synthetic oligonucleotide
gcugaagttggtctgaccuc

SEQ ID NO: 1155 - DNA, 20 bp, Artificial Sequence
  Description of Artificial Sequence: Synthetic oligonucleotide
gggcctcccaaggcaaaccc

SEQ ID NO: 1156 - DNA, 20 bp, Artificial Sequence
  Description of Artificial Sequence: Synthetic oligonucleotide
  Description of Combined DNA/RNA Molecule: Synthetic oligonucleotide
aaccutagctgggtcugcca

SEQ ID NO: 1157 - DNA, 20 bp, Artificial Sequence
  Description of Artificial Sequence: Synthetic oligonucleotide
  Description of Combined DNA/RNA Molecule: Synthetic oligonucleotide
uuguccagctttattgggag

SEQ ID NO: 1158 - DNA, 20 bp, Artificial Sequence
  Description of Artificial Sequence: Synthetic oligonucleotide
  Description of Combined DNA/RNA Molecule: Synthetic oligonucleotide
cuuguccagctttatuggga

SEQ ID NO: 1159 - DNA, 20 bp, Artificial Sequence
  Description of Artificial Sequence: Synthetic oligonucleotide
  Description of Combined DNA/RNA Molecule: Synthetic oligonucleotide
ucuugtccagctttauuggg

SEQ ID NO: 1160 - DNA, 20 bp, Artificial Sequence
  Description of Artificial Sequence: Synthetic oligonucleotide
  Description of Combined DNA/RNA Molecule: Synthetic oligonucleotide
uucuugtccagctttauugg

SEQ ID NO: 1161 - DNA, 20 bp, Artificial Sequence
  Description of Artificial Sequence: Synthetic oligonucleotide
  Description of Combined DNA/RNA Molecule: Synthetic oligonucleotide
cuucutgtccagcttuauug

SEQ ID NO: 1162 - DNA, 20 bp, Artificial Sequence
  Description of Artificial Sequence: Synthetic oligonucleotide
  Description of Combined DNA/RNA Molecule: Synthetic oligonucleotide
gcuucttgtccagctuuauu

SEQ ID NO: 1163 - DNA, 20 bp, Artificial Sequence
  Description of Artificial Sequence: Synthetic oligonucleotide
  Description of Combined DNA/RNA Molecule: Synthetic oligonucleotide
agcuucttgtccagcuuuau

SEQ ID NO: 1164 - DNA, 20 bp, Artificial Sequence
  Description of Artificial Sequence: Synthetic oligonucleotide
  Description of Combined DNA/RNA Molecule: Synthetic oligonucleotide
cagcutcttgtccagcuuua

SEQ ID NO: 1165 - DNA, 20 bp, Artificial Sequence
  Description of Artificial Sequence: Synthetic oligonucleotide
  Description of Combined DNA/RNA Molecule: Synthetic oligonucleotide
gcagcttcttgtccagcuuu

SEQ ID NO: 1166 - DNA, 20 bp, Artificial Sequence
  Description of Artificial Sequence: Synthetic oligonucleotide
  Description of Combined DNA/RNA Molecule: Synthetic oligonucleotide
agcagcttcttgtccagcuu

SEQ ID NO: 1167 - DNA, 20 bp, Artificial Sequence
  Description of Artificial Sequence: Synthetic oligonucleotide
  Description of Combined DNA/RNA Molecule: Synthetic oligonucleotide
uagcagcttcttgtccagcu

SEQ ID NO: 1168 - DNA, 20 bp, Artificial Sequence
  Description of Artificial Sequence: Synthetic oligonucleotide
  Description of Combined DNA/RNA Molecule: Synthetic oligonucleotide
auagcagcttcttgtccagc

SEQ ID NO: 1169 - DNA, 20 bp, Artificial Sequence
  Description of Artificial Sequence: Synthetic oligonucleotide
  Description of Combined DNA/RNA Molecule: Synthetic oligonucleotide
cauagcagcttcttguccag

SEQ ID NO: 1170 - DNA, 20 bp, Artificial Sequence
  Description of Artificial Sequence: Synthetic oligonucleotide
  Description of Combined DNA/RNA Molecule: Synthetic oligonucleotide
uuguccagctttattgggag

SEQ ID NO: 1171 - DNA, 20 bp, Artificial Sequence
  Description of Artificial Sequence: Synthetic oligonucleotide
  Description of Combined DNA/RNA Molecule: Synthetic oligonucleotide
cuuguccagctttatuggga

SEQ ID NO: 1172 - DNA, 20 bp, Artificial Sequence
  Description of Artificial Sequence: Synthetic oligonucleotide
  Description of Combined DNA/RNA Molecule: Synthetic oligonucleotide
ucuugtccagctttauuggg

SEQ ID NO: 1173 - DNA, 20 bp, Artificial Sequence
  Description of Artificial Sequence: Synthetic oligonucleotide
  Description of Combined DNA/RNA Molecule: Synthetic oligonucleotide
uucuugtccagctttauugg

SEQ ID NO: 1174 - DNA, 20 bp, Artificial Sequence
  Description of Artificial Sequence: Synthetic oligonucleotide
  Description of Combined DNA/RNA Molecule: Synthetic oligonucleotide
cuucutgtccagcttuauug

SEQ ID NO: 1175 - DNA, 20 bp, Artificial Sequence
  Description of Artificial Sequence: Synthetic oligonucleotide
  Description of Combined DNA/RNA Molecule: Synthetic oligonucleotide
gcuucttgtccagctuuauu

SEQ ID NO: 1176 - DNA, 20 bp, Artificial Sequence
  Description of Artificial Sequence: Synthetic oligonucleotide
  Description of Combined DNA/RNA Molecule: Synthetic oligonucleotide
agcuucttgtccagcuuuau

SEQ ID NO: 1177 - DNA, 20 bp, Artificial Sequence
  Description of Artificial Sequence: Synthetic oligonucleotide
  Description of Combined DNA/RNA Molecule: Synthetic oligonucleotide
cagcutcttgtccagcuuua

SEQ ID NO: 1178 - DNA, 20 bp, Artificial Sequence
  Description of Artificial Sequence: Synthetic oligonucleotide
  Description of Combined DNA/RNA Molecule: Synthetic oligonucleotide
gcagcttcttgtccagcuuu

SEQ ID NO: 1179 - DNA, 20 bp, Artificial Sequence
  Description of Artificial Sequence: Synthetic oligonucleotide
  Description of Combined DNA/RNA Molecule: Synthetic oligonucleotide
agcagcttcttgtccagcuu

SEQ ID NO: 1180 - DNA, 20 bp, Artificial Sequence
  Description of Artificial Sequence: Synthetic oligonucleotide
  Description of Combined DNA/RNA Molecule: Synthetic oligonucleotide
uagcagcttcttgtccagcu

SEQ ID NO: 1181 - DNA, 20 bp, Artificial Sequence
  Description of Artificial Sequence: Synthetic oligonucleotide
  Description of Combined DNA/RNA Molecule: Synthetic oligonucleotide
auagcagcttcttgtccagc

SEQ ID NO: 1182 - DNA, 20 bp, Artificial Sequence
  Description of Artificial Sequence: Synthetic oligonucleotide
  Description of Combined DNA/RNA Molecule: Synthetic oligonucleotide
cauagcagcttcttguccag

SEQ ID NO: 1183 - DNA, 20 bp, Artificial Sequence
  Description of Artificial Sequence: Synthetic oligonucleotide
agcttcttgtccagctttat

SEQ ID NO: 1184 - DNA, 20 bp, Artificial Sequence
  Description of Artificial Sequence: Synthetic oligonucleotide
  Description of Combined DNA/RNA Molecule: Synthetic oligonucleotide
uguccagctttattgggagg

SEQ ID NO: 1185 - DNA, 20 bp, Artificial Sequence
  Description of Artificial Sequence: Synthetic oligonucleotide
  Description of Combined DNA/RNA Molecule: Synthetic oligonucleotide
uguccagctttattgggagg

SEQ ID NO: 1186 - DNA, 20 bp, Artificial Sequence
  Description of Artificial Sequence: Synthetic oligonucleotide
  Description of Combined DNA/RNA Molecule: Synthetic oligonucleotide
uguccagctttattgggagg

SEQ ID NO: 1187 - DNA, 20 bp, Artificial Sequence
  Description of Artificial Sequence: Synthetic oligonucleotide
  Description of Combined DNA/RNA Molecule: Synthetic oligonucleotide
uguccagctttattgggagg

SEQ ID NO: 1188 - DNA, 20 bp, Artificial Sequence
  Description of Artificial Sequence: Synthetic oligonucleotide
  Description of Combined DNA/RNA Molecule: Synthetic oligonucleotide
uguccagctttattgggagg

SEQ ID NO: 1189 - DNA, 20 bp, Artificial Sequence
  Description of Artificial Sequence: Synthetic oligonucleotide
  Description of Combined DNA/RNA Molecule: Synthetic oligonucleotide
uguccagctttattgggagg

SEQ ID NO: 1190 - DNA, 20 bp, Artificial Sequence
  Description of Artificial Sequence: Synthetic oligonucleotide
  Description of Combined DNA/RNA Molecule: Synthetic oligonucleotide
uguccagctttattgggagg

SEQ ID NO: 1191 - DNA, 20 bp, Artificial Sequence
  Description of Artificial Sequence: Synthetic oligonucleotide
  Description of Combined DNA/RNA Molecule: Synthetic oligonucleotide
uguccagctttattgggagg

SEQ ID NO: 1192 - DNA, 20 bp, Artificial Sequence
  Description of Artificial Sequence: Synthetic oligonucleotide
ggagcagctgcctctaggga

SEQ ID NO: 1193 - DNA, 20 bp, Artificial Sequence
  Description of Artificial Sequence: Synthetic oligonucleotide
  Description of Combined DNA/RNA Molecule: Synthetic oligonucleotide
uggagcagctgcctcuaggg

SEQ ID NO: 1194 - DNA, 20 bp, Artificial Sequence
  Description of Artificial Sequence: Synthetic oligonucleotide
  Description of Combined DNA/RNA Molecule: Synthetic oligonucleotide
uguucctggagcagcugccu

SEQ ID NO: 1195 - DNA, 20 bp, Artificial Sequence
  Description of Artificial Sequence: Synthetic oligonucleotide
  Description of Combined DNA/RNA Molecule: Synthetic oligonucleotide
uccuuggcggtcttgguggc

SEQ ID NO: 1196 - DNA, 20 bp, Artificial Sequence
  Description of Artificial Sequence: Synthetic oligonucleotide
  Description of Combined DNA/RNA Molecule: Synthetic oligonucleotide
auccutggcggtcttggugg

SEQ ID NO: 1197 - DNA, 20 bp, Artificial Sequence
  Description of Artificial Sequence: Synthetic oligonucleotide
  Description of Combined DNA/RNA Molecule: Synthetic oligonucleotide
cauccttggcggtctuggug

SEQ ID NO: 1198 - DNA, 20 bp, Artificial Sequence
  Description of Artificial Sequence: Synthetic oligonucleotide
  Description of Combined DNA/RNA Molecule: Synthetic oligonucleotide
gcauccttggcggtcuuggu

SEQ ID NO: 1199 - DNA, 20 bp, Artificial Sequence
  Description of Artificial Sequence: Synthetic oligonucleotide
  Description of Combined DNA/RNA Molecule: Synthetic oligonucleotide
cuggcctgctgggccaccug

SEQ ID NO: 1200 - DNA, 20 bp, Artificial Sequence
  Description of Artificial Sequence: Synthetic oligonucleotide
  Description of Combined DNA/RNA Molecule: Synthetic oligonucleotide
ggcggtcttggtggcgugcu

SEQ ID NO: 1201 - DNA, 20 bp, Artificial Sequence
  Description of Artificial Sequence: Synthetic oligonucleotide
  Description of Combined DNA/RNA Molecule: Synthetic oligonucleotide
uggcggtcttggtggcgugc

SEQ ID NO: 1202 - DNA, 20 bp, Artificial Sequence
  Description of Artificial Sequence: Synthetic oligonucleotide
  Description of Combined DNA/RNA Molecule: Synthetic oligonucleotide
uuggcggtcttggtggcgug

SEQ ID NO: 1203 - DNA, 20 bp, Artificial Sequence
  Description of Artificial Sequence: Synthetic oligonucleotide
  Description of Combined DNA/RNA Molecule: Synthetic oligonucleotide
cuuggcggtcttggtggcgu

SEQ ID NO: 1204 - DNA, 20 bp, Artificial Sequence
  Description of Artificial Sequence: Synthetic oligonucleotide
  Description of Combined DNA/RNA Molecule: Synthetic oligonucleotide
ccuuggcggtcttgguggcg

SEQ ID NO: 1205 - DNA, 20 bp, Artificial Sequence
  Description of Artificial Sequence: Synthetic oligonucleotide
gcccctggcctgctgggcca

SEQ ID NO: 1206 - DNA, 20 bp, Artificial Sequence
  Description of Artificial Sequence: Synthetic oligonucleotide
ggcagaggccaggagcgcca

SEQ ID NO: 1207 - DNA, 20 bp, Artificial Sequence
  Description of Artificial Sequence: Synthetic oligonucleotide
  Description of Combined DNA/RNA Molecule: Synthetic oligonucleotide
gaggcatcctcggccucuga

SEQ ID NO: 1208 - DNA, 20 bp, Artificial Sequence
  Description of Artificial Sequence: Synthetic oligonucleotide
  Description of Combined DNA/RNA Molecule: Synthetic oligonucleotide
ggaggcatcctcggccucug

SEQ ID NO: 1209 - DNA, 20 bp, Artificial Sequence
  Description of Artificial Sequence: Synthetic oligonucleotide
  Description of Combined DNA/RNA Molecule: Synthetic oligonucleotide
gggaggcatcctcggccucu

SEQ ID NO: 1210 - DNA, 20 bp, Artificial Sequence
  Description of Artificial Sequence: Synthetic oligonucleotide
  Description of Combined DNA/RNA Molecule: Synthetic oligonucleotide
agggaggcatcctcggccuc

SEQ ID NO: 1211 - DNA, 20 bp, Artificial Sequence
  Description of Artificial Sequence: Synthetic oligonucleotide
  Description of Combined DNA/RNA Molecule: Synthetic oligonucleotide
aagggaggcatcctcggccu

SEQ ID NO: 1212 - DNA, 20 bp, Artificial Sequence
  Description of Artificial Sequence: Synthetic oligonucleotide
gaagggaggcatcctcggcc

SEQ ID NO: 1213 - DNA, 20 bp, Artificial Sequence
  Description of Artificial Sequence: Synthetic oligonucleotide
  Description of Combined DNA/RNA Molecule: Synthetic oligonucleotide
ggucutggtggcgtgcuuca

SEQ ID NO: 1214 - DNA, 20 bp, Artificial Sequence
  Description of Artificial Sequence: Synthetic oligonucleotide
  Description of Combined DNA/RNA Molecule: Synthetic oligonucleotide
gcggucttggtggcgugcuu

SEQ ID NO: 1215 - RNA, 20 nt, Artificial Sequence
  Description of Artificial Sequence: Synthetic oligonucleotide
gucucaggcagccacggcug

SEQ ID NO: 1216 - DNA, 20 bp, Artificial Sequence
  Description of Artificial Sequence: Synthetic oligonucleotide
aggccagcatgcctggaggg

SEQ ID NO: 1217 - DNA, 20 bp, Artificial Sequence
  Description of Artificial Sequence: Synthetic oligonucleotide
  Description of Combined DNA/RNA Molecule: Synthetic oligonucleotide
ugcauccttggcggtcuugg

SEQ ID NO: 1218 - DNA, 20 bp, Artificial Sequence
  Description of Artificial Sequence: Synthetic oligonucleotide
  Description of Combined DNA/RNA Molecule: Synthetic oligonucleotide
gugcatccttggcggucuug

SEQ ID NO: 1219 - DNA, 20 bp, Artificial Sequence
  Description of Artificial Sequence: Synthetic oligonucleotide
  Description of Combined DNA/RNA Molecule: Synthetic oligonucleotide
cugcugggccacctgggacu

SEQ ID NO: 1220 - DNA, 20 bp, Artificial Sequence
  Description of Artificial Sequence: Synthetic oligonucleotide
  Description of Combined DNA/RNA Molecule: Synthetic oligonucleotide
ugaagccatcggtcacccag

SEQ ID NO: 1221 - DNA, 20 bp, Artificial Sequence
  Description of Artificial Sequence: Synthetic oligonucleotide
  Description of Combined DNA/RNA Molecule: Synthetic oligonucleotide
cugaagccatcggtcaccca

SEQ ID NO: 1222 - DNA, 20 bp, Artificial Sequence
  Description of Artificial Sequence: Synthetic oligonucleotide
  Description of Combined DNA/RNA Molecule: Synthetic oligonucleotide
cuuguccttaacggtgcucc

SEQ ID NO: 1223 - DNA, 20 bp, Artificial Sequence
  Description of Artificial Sequence: Synthetic oligonucleotide
  Description of Combined DNA/RNA Molecule: Synthetic oligonucleotide
uguccagctttattgggagg

SEQ ID NO: 1224 - DNA, 20 bp, Artificial Sequence
  Description of Artificial Sequence: Synthetic oligonucleotide
  Description of Combined DNA/RNA Molecule: Synthetic oligonucleotide
ugccuctagggatgaacuga

SEQ ID NO: 1225 - DNA, 20 bp, Artificial Sequence
  Description of Artificial Sequence: Synthetic oligonucleotide
  Description of Combined DNA/RNA Molecule: Synthetic oligonucleotide
cugcatggcacctctguucc

SEQ ID NO: 1226 - DNA, 20 bp, Artificial Sequence
  Description of Artificial Sequence: Synthetic oligonucleotide
  Description of Combined DNA/RNA Molecule: Synthetic oligonucleotide
gggcugcatggcaccucugu

SEQ ID NO: 1227 - DNA, 20 bp, Artificial Sequence
  Description of Artificial Sequence: Synthetic oligonucleotide
  Description of Combined DNA/RNA Molecule: Synthetic oligonucleotide
cucugaagctcgggcagagg

SEQ ID NO: 1228 - DNA, 20 bp, Artificial Sequence
  Description of Artificial Sequence: Synthetic oligonucleotide
  Description of Combined DNA/RNA Molecule: Synthetic oligonucleotide
ccucugaagctcgggcagag

SEQ ID NO: 1229 - DNA, 20 bp, Artificial Sequence
  Description of Artificial Sequence: Synthetic oligonucleotide
  Description of Combined DNA/RNA Molecule: Synthetic oligonucleotide
gccuctgaagctcgggcaga

SEQ ID NO: 1230 - DNA, 20 bp, Artificial Sequence
  Description of Artificial Sequence: Synthetic oligonucleotide
cggcctctgaagctcgggca

SEQ ID NO: 1231 - DNA, 20 bp, Artificial Sequence
  Description of Artificial Sequence: Synthetic oligonucleotide
  Description of Combined DNA/RNA Molecule: Synthetic oligonucleotide
ucggcctctgaagctcgggc

SEQ ID NO: 1232 - DNA, 20 bp, Artificial Sequence
  Description of Artificial Sequence: Synthetic oligonucleotide
  Description of Combined DNA/RNA Molecule: Synthetic oligonucleotide
cucggcctctgaagcucggg

SEQ ID NO: 1233 - DNA, 20 bp, Artificial Sequence
  Description of Artificial Sequence: Synthetic oligonucleotide
  Description of Combined DNA/RNA Molecule: Synthetic oligonucleotide
ccucggcctctgaagcucgg

SEQ ID NO: 1234 - DNA, 20 bp, Artificial Sequence
  Description of Artificial Sequence: Synthetic oligonucleotide
  Description of Combined DNA/RNA Molecule: Synthetic oligonucleotide
uccucggcctctgaagcucg

SEQ ID NO: 1235 - DNA, 20 bp, Artificial Sequence
  Description of Artificial Sequence: Synthetic oligonucleotide
  Description of Combined DNA/RNA Molecule: Synthetic oligonucleotide
ugcucagtgcatcctuggcg

SEQ ID NO: 1236 - DNA, 20 bp, Artificial Sequence
  Description of Artificial Sequence: Synthetic oligonucleotide
  Description of Combined DNA/RNA Molecule: Synthetic oligonucleotide
ccugggactcctgcacgcug

SEQ ID NO: 1237 - DNA, 20 bp, Artificial Sequence
  Description of Artificial Sequence: Synthetic oligonucleotide
ccacctgggactcctgcacg

SEQ ID NO: 1238 - RNA, 20 nt, Artificial Sequence
  Description of Artificial Sequence: Synthetic oligonucleotide
ucggucacccagccccuggc

SEQ ID NO: 1239 - DNA, 20 bp, Artificial Sequence
  Description of Artificial Sequence: Synthetic oligonucleotide
  Description of Combined DNA/RNA Molecule: Synthetic oligonucleotide
aucggtcacccagccccugg

SEQ ID NO: 1240 - DNA, 20 bp, Artificial Sequence
  Description of Artificial Sequence: Synthetic oligonucleotide
  Description of Combined DNA/RNA Molecule: Synthetic oligonucleotide
caucggtcacccagccccug

SEQ ID NO: 1241 - DNA, 20 bp, Artificial Sequence
  Description of Artificial Sequence: Synthetic oligonucleotide
  Description of Combined DNA/RNA Molecule: Synthetic oligonucleotide
ccaucggtcacccagccccu

SEQ ID NO: 1242 - DNA, 20 bp, Artificial Sequence
  Description of Artificial Sequence: Synthetic oligonucleotide
  Description of Combined DNA/RNA Molecule: Synthetic oligonucleotide
gccaucggtcacccagcccc

SEQ ID NO: 1243 - DNA, 20 bp, Artificial Sequence
  Description of Artificial Sequence: Synthetic oligonucleotide
agccatcggtcacccagccc

SEQ ID NO: 1244 - DNA, 20 bp, Artificial Sequence
  Description of Artificial Sequence: Synthetic oligonucleotide
  Description of Combined DNA/RNA Molecule: Synthetic oligonucleotide
uccagctttattgggaggcc

SEQ ID NO: 1245 - DNA, 20 bp, Artificial Sequence
  Description of Artificial Sequence: Synthetic oligonucleotide
  Description of Combined DNA/RNA Molecule: Synthetic oligonucleotide
caucctcggcctctgaagcu

SEQ ID NO: 1246 - DNA, 20 bp, Artificial Sequence
  Description of Artificial Sequence: Synthetic oligonucleotide
  Description of Combined DNA/RNA Molecule: Synthetic oligonucleotide
aggcatcctcggcctcugaa

SEQ ID NO: 1247 - DNA, 20 bp, Artificial Sequence
  Description of Artificial Sequence: Synthetic oligonucleotide
  Description of Combined DNA/RNA Molecule: Synthetic oligonucleotide
ucuuggtggcgtgctucaug

SEQ ID NO: 1248 - DNA, 20 bp, Artificial Sequence
  Description of Artificial Sequence: Synthetic oligonucleotide
  Description of Combined DNA/RNA Molecule: Synthetic oligonucleotide
cacgctgctcagtgcauccu

SEQ ID NO: 1249 - DNA, 20 bp, Artificial Sequence
  Description of Artificial Sequence: Synthetic oligonucleotide
  Description of Combined DNA/RNA Molecule: Synthetic oligonucleotide
cuccugcacgctgctcagug

SEQ ID NO: 1250 - DNA, 20 bp, Artificial Sequence
  Description of Artificial Sequence: Synthetic oligonucleotide
  Description of Combined DNA/RNA Molecule: Synthetic oligonucleotide
ggacucctgcacgctgcuca

SEQ ID NO: 1251 - DNA, 20 bp, Artificial Sequence
  Description of Artificial Sequence: Synthetic oligonucleotide
  Description of Combined DNA/RNA Molecule: Synthetic oligonucleotide
gggactcctgcacgcugcuc

SEQ ID NO: 1252 - DNA, 20 bp, Artificial Sequence
  Description of Artificial Sequence: Synthetic oligonucleotide
  Description of Combined DNA/RNA Molecule: Synthetic oligonucleotide
ugggactcctgcacgcugcu

SEQ ID NO: 1253 - DNA, 20 bp, Artificial Sequence
  Description of Artificial Sequence: Synthetic oligonucleotide
  Description of Combined DNA/RNA Molecule: Synthetic oligonucleotide
agguctcaggcagccacggc

SEQ ID NO: 1254 - DNA, 20 bp, Artificial Sequence
  Description of Artificial Sequence: Synthetic oligonucleotide
  Description of Combined DNA/RNA Molecule: Synthetic oligonucleotide
gagguctcaggcagccacgg

SEQ ID NO: 1255 - DNA, 20 bp, Artificial Sequence
  Description of Artificial Sequence: Synthetic oligonucleotide
  Description of Combined DNA/RNA Molecule: Synthetic oligonucleotide
ugaggtctcaggcagccacg

SEQ ID NO: 1256 - DNA, 20 bp, Artificial Sequence
  Description of Artificial Sequence: Synthetic oligonucleotide
  Description of Combined DNA/RNA Molecule: Synthetic oligonucleotide
ccuggagattgcaggaccca

SEQ ID NO: 1257 - DNA, 20 bp, Artificial Sequence
  Description of Artificial Sequence: Synthetic oligonucleotide
  Description of Combined DNA/RNA Molecule: Synthetic oligonucleotide
gcccuggagattgcaggacc

SEQ ID NO: 1258 - DNA, 20 bp, Artificial Sequence
  Description of Artificial Sequence: Synthetic oligonucleotide
ccaggagcgccaggagggca

SEQ ID NO: 1259 - DNA, 20 bp, Artificial Sequence
  Description of Artificial Sequence: Synthetic oligonucleotide
  Description of Combined DNA/RNA Molecule: Synthetic oligonucleotide
cgugcttcatgtaacccugc

SEQ ID NO: 1260 - DNA, 20 bp, Artificial Sequence
  Description of Artificial Sequence: Synthetic oligonucleotide
  Description of Combined DNA/RNA Molecule: Synthetic oligonucleotide
ugguctgacctcagggucca

SEQ ID NO: 1261 - DNA, 20 bp, Artificial Sequence
  Description of Artificial Sequence: Synthetic oligonucleotide
  Description of Combined DNA/RNA Molecule: Synthetic oligonucleotide
uugguctgacctcagggucc

SEQ ID NO: 1262 - DNA, 20 bp, Artificial Sequence
  Description of Artificial Sequence: Synthetic oligonucleotide
  Description of Combined DNA/RNA Molecule: Synthetic oligonucleotide
aaguuggtctgacctcaggg

SEQ ID NO: 1263 - DNA, 20 bp, Artificial Sequence
  Description of Artificial Sequence: Synthetic oligonucleotide
  Description of Combined DNA/RNA Molecule: Synthetic oligonucleotide
ugaagttggtctgaccucag

SEQ ID NO: 1264 - DNA, 20 bp, Artificial Sequence
  Description of Artificial Sequence: Synthetic oligonucleotide
  Description of Combined DNA/RNA Molecule: Synthetic oligonucleotide
cacggctgaagttggucuga

SEQ ID NO: 1265 - DNA, 20 bp, Artificial Sequence
  Description of Artificial Sequence: Synthetic oligonucleotide
  Description of Combined DNA/RNA Molecule: Synthetic oligonucleotide
ccacggctgaagttggucug

SEQ ID NO: 1266 - DNA, 20 bp, Artificial Sequence
  Description of Artificial Sequence: Synthetic oligonucleotide
  Description of Combined DNA/RNA Molecule: Synthetic oligonucleotide
gccacggctgaagttggucu

SEQ ID NO: 1267 - DNA, 20 bp, Artificial Sequence
  Description of Artificial Sequence: Synthetic oligonucleotide
  Description of Combined DNA/RNA Molecule: Synthetic oligonucleotide
agccacggctgaagtugguc

SEQ ID NO: 1268 - DNA, 20 bp, Artificial Sequence
  Description of Artificial Sequence: Synthetic oligonucleotide
  Description of Combined DNA/RNA Molecule: Synthetic oligonucleotide
gucuuggtggcgtgcuucau

SEQ ID NO: 1269 - DNA, 20 bp, Artificial Sequence
  Description of Artificial Sequence: Synthetic oligonucleotide
  Description of Combined DNA/RNA Molecule: Synthetic oligonucleotide
cagugcatccttggcggucu

SEQ ID NO: 1270 - DNA, 20 bp, Artificial Sequence
  Description of Artificial Sequence: Synthetic oligonucleotide
  Description of Combined DNA/RNA Molecule: Synthetic oligonucleotide
cugcctctagggatgaacug

SEQ ID NO: 1271 - DNA, 20 bp, Artificial Sequence
  Description of Artificial Sequence: Synthetic oligonucleotide
  Description of Combined DNA/RNA Molecule: Synthetic oligonucleotide
ggcaucctcggcctcugaag

SEQ ID NO: 1272 - DNA, 20 bp, Artificial Sequence
  Description of Artificial Sequence: Synthetic oligonucleotide
  Description of Combined DNA/RNA Molecule: Synthetic oligonucleotide
uugguggcgtgcttcaugua

SEQ ID NO: 1273 - DNA, 20 bp, Artificial Sequence
  Description of Artificial Sequence: Synthetic oligonucleotide
  Description of Combined DNA/RNA Molecule: Synthetic oligonucleotide
gcgugcttcatgtaacccug

SEQ ID NO: 1274 - DNA, 20 bp, Artificial Sequence
  Description of Artificial Sequence: Synthetic oligonucleotide
  Description of Combined DNA/RNA Molecule: Synthetic oligonucleotide
ugagaagggaggcatccucg

SEQ ID NO: 1275 - DNA, 20 bp, Artificial Sequence
  Description of Artificial Sequence: Synthetic oligonucleotide
  Description of Combined DNA/RNA Molecule: Synthetic oligonucleotide
gcugaagttggtctgaccuc

SEQ ID NO: 1276 - DNA, 20 bp, Artificial Sequence
  Description of Artificial Sequence: Synthetic oligonucleotide
gggcctcccaaggcaaaccc

SEQ ID NO: 1277 - DNA, 20 bp, Artificial Sequence
  Description of Artificial Sequence: Synthetic oligonucleotide
  Description of Combined DNA/RNA Molecule: Synthetic oligonucleotide
guuuatgcccctgggccuga

SEQ ID NO: 1278 - DNA, 20 bp, Artificial Sequence
  Description of Artificial Sequence: Synthetic oligonucleotide
  Description of Combined DNA/RNA Molecule: Synthetic oligonucleotide
aaccutagctgggtcugcca

SEQ ID NO: 1279 - DNA, 20 bp, Artificial Sequence
  Description of Artificial Sequence: Synthetic oligonucleotide
  Description of Combined DNA/RNA Molecule: Synthetic oligonucleotide
cacccattgggactgggauc

SEQ ID NO: 1280 - DNA, 20 bp, Artificial Sequence
  Description of Artificial Sequence: Synthetic oligonucleotide
  Description of Combined DNA/RNA Molecule: Synthetic oligonucleotide
cuccugcttgaccacccauu

SEQ ID NO: 1281 - DNA, 20 bp, Artificial Sequence
  Description of Artificial Sequence: Synthetic oligonucleotide
  Description of Combined DNA/RNA Molecule: Synthetic oligonucleotide
gcucctgcttgaccacccau

SEQ ID NO: 1282 - DNA, 20 bp, Artificial Sequence
  Description of Artificial Sequence: Synthetic oligonucleotide
  Description of Combined DNA/RNA Molecule: Synthetic oligonucleotide
ugggctcctgcttgaccacc

SEQ ID NO: 1283 - DNA, 45 bp, Artificial Sequence
  Description of Artificial Sequence: Synthetic oligonucleotide
  Description of Combined DNA/RNA Molecule: Synthetic oligonucleotide
tguccagcuuuauugggagtutttttggtaatccactttcagagg

SEQ ID NO: 1284 - DNA, 45 bp, Artificial Sequence; identical to SEQ ID NO: 1283
  Description of Artificial Sequence: Synthetic oligonucleotide
  Description of Combined DNA/RNA Molecule: Synthetic oligonucleotide

SEQ ID NO: 1285 - DNA, 45 bp, Artificial Sequence; identical to SEQ ID NO: 1283
  Description of Artificial Sequence: Synthetic oligonucleotide
  Description of Combined DNA/RNA Molecule: Synthetic oligonucleotide

SEQ ID NO: 1286 - DNA, 45 bp, Artificial Sequence; identical to SEQ ID NO: 1283
  Description of Artificial Sequence: Synthetic oligonucleotide
  Description of Combined DNA/RNA Molecule: Synthetic oligonucleotide

SEQ ID NO: 1287 - DNA, 45 bp, Artificial Sequence; identical to SEQ ID NO: 1283
  Description of Artificial Sequence: Synthetic oligonucleotide
  Description of Combined DNA/RNA Molecule: Synthetic oligonucleotide

SEQ ID NO: 1288 - DNA, 45 bp, Artificial Sequence; identical to SEQ ID NO: 1283
  Description of Artificial Sequence: Synthetic oligonucleotide
  Description of Combined DNA/RNA Molecule: Synthetic oligonucleotide

SEQ ID NO: 1289 - DNA, 45 bp, Artificial Sequence; identical to SEQ ID NO: 1283
  Description of Artificial Sequence: Synthetic oligonucleotide
  Description of Combined DNA/RNA Molecule: Synthetic oligonucleotide

SEQ ID NO: 1290 - DNA, 45 bp, Artificial Sequence; identical to SEQ ID NO: 1283
  Description of Artificial Sequence: Synthetic oligonucleotide
  Description of Combined DNA/RNA Molecule: Synthetic oligonucleotide

SEQ ID NO: 1291 - DNA, 45 bp, Artificial Sequence; identical to SEQ ID NO: 1283
  Description of Artificial Sequence: Synthetic oligonucleotide
  Description of Combined DNA/RNA Molecule: Synthetic oligonucleotide

SEQ ID NO: 1292 - DNA, 23 bp, Artificial Sequence
  Description of Artificial Sequence: Synthetic oligonucleotide
  Description of Combined DNA/RNA Molecule: Synthetic oligonucleotide
tguccagcuuuauugggaggctu

SEQ ID NO: 1293 - DNA, 23 bp, Artificial Sequence
  Description of Artificial Sequence: Synthetic oligonucleotide
  Description of Combined DNA/RNA Molecule: Synthetic oligonucleotide
tagcuucuuguccagcuuuautu

SEQ ID NO: 1294 - DNA, 45 bp, Artificial Sequence; identical to SEQ ID NO: 1283
  Description of Artificial Sequence: Synthetic oligonucleotide
  Description of Combined DNA/RNA Molecule: Synthetic oligonucleotide

SEQ ID NO: 1295 - DNA, 23 bp, Artificial Sequence
  Description of Artificial Sequence: Synthetic oligonucleotide
  Description of Combined DNA/RNA Molecule: Synthetic oligonucleotide
tguccagcuuuauugggaggctu

SEQ ID NO: 1296 - DNA, 23 bp, Artificial Sequence
  Description of Artificial Sequence: Synthetic oligonucleotide
  Description of Combined DNA/RNA Molecule: Synthetic oligonucleotide
tagcuucuuguccagcuuuautu

SEQ ID NO: 1297 - DNA, 23 bp, Artificial Sequence
  Description of Artificial Sequence: Synthetic oligonucleotide
  Description of Combined DNA/RNA Molecule: Synthetic oligonucleotide
tguccagcuuuauugggaggctu

SEQ ID NO: 1298 - DNA, 23 bp, Artificial Sequence
  Description of Artificial Sequence: Synthetic oligonucleotide
  Description of Combined DNA/RNA Molecule: Synthetic oligonucleotide
tguccagcuuuauugggaggctu

SEQ ID NO: 1299 - DNA, 23 bp, Artificial Sequence
  Description of Artificial Sequence: Synthetic oligonucleotide
  Description of Combined DNA/RNA Molecule: Synthetic oligonucleotide
tguccagcuuuauugggaggctu

SEQ ID NO: 1300 - DNA, 23 bp, Artificial Sequence
  Description of Artificial Sequence: Synthetic oligonucleotide
  Description of Combined DNA/RNA Molecule: Synthetic oligonucleotide
tguccagcuuuauugggaggctu

SEQ ID NO: 1301 - DNA, 23 bp, Artificial Sequence
  Description of Artificial Sequence: Synthetic oligonucleotide
  Description of Combined DNA/RNA Molecule: Synthetic oligonucleotide
tguccagcuuuauugggaggctu

SEQ ID NO: 1302 - DNA, 23 bp, Artificial Sequence
  Description of Artificial Sequence: Synthetic oligonucleotide
  Description of Combined DNA/RNA Molecule: Synthetic oligonucleotide
tguccagcuuuauugggaggctu

SEQ ID NO: 1303 - DNA, 23 bp, Artificial Sequence
  Description of Artificial Sequence: Synthetic oligonucleotide
  Description of Combined DNA/RNA Molecule: Synthetic oligonucleotide
tguccagcuuuauugggaggctu

SEQ ID NO: 1304 - DNA, 23 bp, Artificial Sequence
  Description of Artificial Sequence: Synthetic oligonucleotide
  Description of Combined DNA/RNA Molecule: Synthetic oligonucleotide
tguccagcuuuauugggaggctu

SEQ ID NO: 1305 - DNA, 23 bp, Artificial Sequence
  Description of Artificial Sequence: Synthetic oligonucleotide
  Description of Combined DNA/RNA Molecule: Synthetic oligonucleotide
tagcuucuuguccagcuuuautu

SEQ ID NO: 1306 - DNA, 23 bp, Artificial Sequence
  Description of Artificial Sequence: Synthetic oligonucleotide
  Description of Combined DNA/RNA Molecule: Synthetic oligonucleotide
tagcuucuuguccagcuuuautu

SEQ ID NO: 1307 - DNA, 23 bp, Artificial Sequence
  Description of Artificial Sequence: Synthetic oligonucleotide
  Description of Combined DNA/RNA Molecule: Synthetic oligonucleotide
tguccagcuuuauugggaggctu

SEQ ID NO: 1308 - DNA, 23 bp, Artificial Sequence
  Description of Artificial Sequence: Synthetic oligonucleotide
  Description of Combined DNA/RNA Molecule: Synthetic oligonucleotide
tguccagcuuuauugggaggctu

SEQ ID NO: 1309 - DNA, 23 bp, Artificial Sequence
  Description of Artificial Sequence: Synthetic oligonucleotide
  Description of Combined DNA/RNA Molecule: Synthetic oligonucleotide
tagcuucuuguccagcuuuautu

SEQ ID NO: 1310 - DNA, 23 bp, Artificial Sequence
  Description of Artificial Sequence: Synthetic oligonucleotide
  Description of Combined DNA/RNA Molecule: Synthetic oligonucleotide
tagcuucuuguccagcuuuautu

SEQ ID NO: 1311 - DNA, 23 bp, Artificial Sequence
  Description of Artificial Sequence: Synthetic oligonucleotide
  Description of Combined DNA/RNA Molecule: Synthetic oligonucleotide
tguccagcuuuauugggaggctu

SEQ ID NO: 1312 - DNA, 23 bp, Artificial Sequence
  Description of Artificial Sequence: Synthetic oligonucleotide
  Description of Combined DNA/RNA Molecule: Synthetic oligonucleotide
tagcuucuuguccagcuuuautu

SEQ ID NO: 1313 - DNA, 23 bp, Artificial Sequence
  Description of Artificial Sequence: Synthetic oligonucleotide
  Description of Combined DNA/RNA Molecule: Synthetic oligonucleotide
tguccagcuuuauugggaggctu

SEQ ID NO: 1314 - DNA, 23 bp, Artificial Sequence
  Description of Artificial Sequence: Synthetic oligonucleotide
  Description of Combined DNA/RNA Molecule: Synthetic oligonucleotide
tagcuucuuguccagcuuuautu

SEQ ID NO: 1315 - DNA, 23 bp, Artificial Sequence
  Description of Artificial Sequence: Synthetic oligonucleotide
  Description of Combined DNA/RNA Molecule: Synthetic oligonucleotide
tguccagcuuuauugggaggctu

SEQ ID NO: 1316 - DNA, 23 bp, Artificial Sequence
  Description of Artificial Sequence: Synthetic oligonucleotide
  Description of Combined DNA/RNA Molecule: Synthetic oligonucleotide
tagcuucuuguccagcuuuautu

SEQ ID NO: 1317 - DNA, 20 bp, Artificial Sequence
  Description of Artificial Sequence: Synthetic oligonucleotide
  Description of Combined DNA/RNA Molecule: Synthetic oligonucleotide
agctucttgtccagcuuuau

SEQ ID NO: 1318 - DNA, 20 bp, Artificial Sequence
  Description of Artificial Sequence: Synthetic oligonucleotide
  Description of Combined DNA/RNA Molecule: Synthetic oligonucleotide
agctucttgtccagcuuuau

SEQ ID NO: 1319 - DNA, 20 bp, Artificial Sequence
  Description of Artificial Sequence: Synthetic oligonucleotide
  Description of Combined DNA/RNA Molecule: Synthetic oligonucleotide
agctucttgtccagcuuuau

SEQ ID NO: 1320 - DNA, 20 bp, Artificial Sequence
  Description of Artificial Sequence: Synthetic oligonucleotide
  Description of Combined DNA/RNA Molecule: Synthetic oligonucleotide
agctucttgtccagcuuuau

SEQ ID NO: 1321 - DNA, 20 bp, Artificial Sequence
  Description of Artificial Sequence: Synthetic oligonucleotide
  Description of Combined DNA/RNA Molecule: Synthetic oligonucleotide
agctucttgtccagcuuuau

SEQ ID NO: 1322 - DNA, 20 bp, Artificial Sequence
  Description of Artificial Sequence: Synthetic oligonucleotide
  Description of Combined DNA/RNA Molecule: Synthetic oligonucleotide
agctucttgtccagcuuuau

SEQ ID NO: 1323 - DNA, 20 bp, Artificial Sequence
  Description of Artificial Sequence: Synthetic oligonucleotide
  Description of Combined DNA/RNA Molecule: Synthetic oligonucleotide
agctucttgtccagcuuuau

SEQ ID NO: 1324 - DNA, 20 bp, Artificial Sequence
  Description of Artificial Sequence: Synthetic oligonucleotide
  Description of Combined DNA/RNA Molecule: Synthetic oligonucleotide
agctucttgtccagcuuuau

SEQ ID NO: 1325 - DNA, 20 bp, Artificial Sequence
  Description of Artificial Sequence: Synthetic oligonucleotide
  Description of Combined DNA/RNA Molecule: Synthetic oligonucleotide
agctucttgtccagcuuuau

SEQ ID NO: 1326 - DNA, 20 bp, Artificial Sequence
  Description of Artificial Sequence: Synthetic oligonucleotide
  Description of Combined DNA/RNA Molecule: Synthetic oligonucleotide
agctucttgtccagcuuuau

SEQ ID NO: 1327 - DNA, 20 bp, Artificial Sequence
  Description of Artificial Sequence: Synthetic oligonucleotide
  Description of Combined DNA/RNA Molecule: Synthetic oligonucleotide
agctucttgtccagcuuuau

SEQ ID NO: 1328 - DNA, 20 bp, Artificial Sequence
  Description of Artificial Sequence: Synthetic oligonucleotide
  Description of Combined DNA/RNA Molecule: Synthetic oligonucleotide
agctucttgtccagcuuuau

SEQ ID NO: 1329 - DNA, 20 bp, Artificial Sequence
  Description of Artificial Sequence: Synthetic oligonucleotide
  Description of Combined DNA/RNA Molecule: Synthetic oligonucleotide
agctucttgtccagcuuuau

SEQ ID NO: 1330 - DNA, 20 bp, Artificial Sequence
  Description of Artificial Sequence: Synthetic oligonucleotide
  Description of Combined DNA/RNA Molecule: Synthetic oligonucleotide
agctucttgtccagcuuuau

SEQ ID NO: 1331 - DNA, 20 bp, Artificial Sequence
  Description of Artificial Sequence: Synthetic oligonucleotide
cttgtccagctttattggga

SEQ ID NO: 1332 - DNA, 20 bp, Artificial Sequence
  Description of Artificial Sequence: Synthetic oligonucleotide
cttgtccagctttattggga

SEQ ID NO: 1333 - DNA, 20 bp, Artificial Sequence
  Description of Artificial Sequence: Synthetic oligonucleotide
cttgtccagctttattggga

SEQ ID NO: 1334 - DNA, 20 bp, Artificial Sequence
  Description of Artificial Sequence: Synthetic oligonucleotide
cttgtccagctttattggga

SEQ ID NO: 1335 - DNA, 20 bp, Artificial Sequence
  Description of Artificial Sequence: Synthetic oligonucleotide
  Description of Combined DNA/RNA Molecule: Synthetic oligonucleotide
cttgtccagctttatuggga

SEQ ID NO: 1336 - DNA, 20 bp, Artificial Sequence
  Description of Artificial Sequence: Synthetic oligonucleotide
  Description of Combined DNA/RNA Molecule: Synthetic oligonucleotide
cttgtccagctttatuggga

SEQ ID NO: 1337 - DNA, 20 bp, Artificial Sequence
  Description of Artificial Sequence: Synthetic oligonucleotide
  Description of Combined DNA/RNA Molecule: Synthetic oligonucleotide
cttgtccagctttatuggga

SEQ ID NO: 1338 - DNA, 20 bp, Artificial Sequence
  Description of Artificial Sequence: Synthetic oligonucleotide
  Description of Combined DNA/RNA Molecule: Synthetic oligonucleotide
cttgtccagctttatuggga

SEQ ID NO: 1339 - DNA, 20 bp, Artificial Sequence
  Description of Artificial Sequence: Synthetic oligonucleotide
atagcagcttcttgtccagc

SEQ ID NO: 1340 - DNA, 20 bp, Artificial Sequence
  Description of Artificial Sequence: Synthetic oligonucleotide
atagcagcttcttgtccagc

SEQ ID NO: 1341 - DNA, 20 bp, Artificial Sequence
  Description of Artificial Sequence: Synthetic oligonucleotide
atagcagcttcttgtccagc

SEQ ID NO: 1342 - DNA, 20 bp, Artificial Sequence
  Description of Artificial Sequence: Synthetic oligonucleotide
atagcagcttcttgtccagc

SEQ ID NO: 1343 - DNA, 20 bp, Artificial Sequence
  Description of Artificial Sequence: Synthetic oligonucleotide
atagcagcttcttgtccagc

SEQ ID NO: 1344 - DNA, 20 bp, Artificial Sequence
  Description of Artificial Sequence: Synthetic oligonucleotide
atagcagcttcttgtccagc

SEQ ID NO: 1345 - DNA, 20 bp, Artificial Sequence
  Description of Artificial Sequence: Synthetic oligonucleotide
atagcagcttcttgtccagc

SEQ ID NO: 1346 - DNA, 20 bp, Artificial Sequence
  Description of Artificial Sequence: Synthetic oligonucleotide
atagcagcttcttgtccagc

SEQ ID NO: 1347 - DNA, 20 bp, Artificial Sequence
  Description of Artificial Sequence: Synthetic oligonucleotide
cttgtccagctttattggga

SEQ ID NO: 1348 - DNA, 20 bp, Artificial Sequence
  Description of Artificial Sequence: Synthetic oligonucleotide
cttgtccagctttattggga

SEQ ID NO: 1349 - DNA, 20 bp, Artificial Sequence
  Description of Artificial Sequence: Synthetic oligonucleotide
cttgtccagctttattggga

SEQ ID NO: 1350 - DNA, 20 bp, Artificial Sequence
  Description of Artificial Sequence: Synthetic oligonucleotide
cttgtccagctttattggga

SEQ ID NO: 1351 - DNA, 20 bp, Artificial Sequence
  Description of Artificial Sequence: Synthetic oligonucleotide
  Description of Combined DNA/RNA Molecule: Synthetic oligonucleotide
cttgtccagctttatuggga

SEQ ID NO: 1352 - DNA, 20 bp, Artificial Sequence
  Description of Artificial Sequence: Synthetic oligonucleotide
  Description of Combined DNA/RNA Molecule: Synthetic oligonucleotide
cttgtccagctttatuggga

SEQ ID NO: 1353 - DNA, 20 bp, Artificial Sequence
  Description of Artificial Sequence: Synthetic oligonucleotide
  Description of Combined DNA/RNA Molecule: Synthetic oligonucleotide
cttgtccagctttatuggga

SEQ ID NO: 1354 - DNA, 20 bp, Artificial Sequence
  Description of Artificial Sequence: Synthetic oligonucleotide
  Description of Combined DNA/RNA Molecule: Synthetic oligonucleotide
cttgtccagctttatuggga

SEQ ID NO: 1355 - DNA, 20 bp, Artificial Sequence
  Description of Artificial Sequence: Synthetic oligonucleotide
atagcagcttcttgtccagc

SEQ ID NO: 1356 - DNA, 20 bp, Artificial Sequence
  Description of Artificial Sequence: Synthetic oligonucleotide
atagcagcttcttgtccagc

SEQ ID NO: 1357 - DNA, 20 bp, Artificial Sequence
  Description of Artificial Sequence: Synthetic oligonucleotide
atagcagcttcttgtccagc

SEQ ID NO: 1358 - DNA, 20 bp, Artificial Sequence
  Description of Artificial Sequence: Synthetic oligonucleotide
atagcagcttcttgtccagc

SEQ ID NO: 1359 - DNA, 20 bp, Artificial Sequence
  Description of Artificial Sequence: Synthetic oligonucleotide
atagcagcttcttgtccagc

SEQ ID NO: 1360 - DNA, 20 bp, Artificial Sequence
  Description of Artificial Sequence: Synthetic oligonucleotide
atagcagcttcttgtccagc

SEQ ID NO: 1361 - DNA, 20 bp, Artificial Sequence
  Description of Artificial Sequence: Synthetic oligonucleotide
atagcagcttcttgtccagc

SEQ ID NO: 1362 - DNA, 20 bp, Artificial Sequence
  Description of Artificial Sequence: Synthetic oligonucleotide
atagcagcttcttgtccagc

SEQ ID NO: 1363 - DNA, 20 bp, Artificial Sequence
  Description of Artificial Sequence: Synthetic oligonucleotide
atagcagcttcttgtccagc

SEQ ID NO: 1364 - DNA, 20 bp, Artificial Sequence
  Description of Artificial Sequence: Synthetic oligonucleotide
atagcagcttcttgtccagc

SEQ ID NO: 1365 - DNA, 20 bp, Artificial Sequence
  Description of Artificial Sequence: Synthetic oligonucleotide
atagcagcttcttgtccagc

SEQ ID NO: 1366 - DNA, 20 bp, Artificial Sequence
  Description of Artificial Sequence: Synthetic oligonucleotide
atagcagcttcttgtccagc

SEQ ID NO: 1367 - DNA, 20 bp, Artificial Sequence
  Description of Artificial Sequence: Synthetic oligonucleotide
atagcagcttcttgtccagc

SEQ ID NO: 1368 - DNA, 20 bp, Artificial Sequence
  Description of Artificial Sequence: Synthetic oligonucleotide
atagcagcttcttgtccagc

SEQ ID NO: 1369 - DNA, 20 bp, Artificial Sequence
  Description of Artificial Sequence: Synthetic oligonucleotide
atagcagcttcttgtccagc

SEQ ID NO: 1370 - DNA, 20 bp, Artificial Sequence
  Description of Artificial Sequence: Synthetic oligonucleotide
atagcagcttcttgtccagc

SEQ ID NO: 1371 - DNA, 20 bp, Artificial Sequence
  Description of Artificial Sequence: Synthetic oligonucleotide
  Description of Combined DNA/RNA Molecule: Synthetic oligonucleotide
cttguccagctttatuggga

SEQ ID NO: 1372 - DNA, 20 bp, Artificial Sequence
  Description of Artificial Sequence: Synthetic oligonucleotide
  Description of Combined DNA/RNA Molecule: Synthetic oligonucleotide
cttguccagctttatuggga

SEQ ID NO: 1373 - DNA, 20 bp, Artificial Sequence
  Description of Artificial Sequence: Synthetic oligonucleotide
  Description of Combined DNA/RNA Molecule: Synthetic oligonucleotide
cttguccagctttatuggga

SEQ ID NO: 1374 - DNA, 20 bp, Artificial Sequence
  Description of Artificial Sequence: Synthetic oligonucleotide
  Description of Combined DNA/RNA Molecule: Synthetic oligonucleotide
cttguccagctttatuggga

SEQ ID NO: 1375 - DNA, 20 bp, Artificial Sequence
  Description of Artificial Sequence: Synthetic oligonucleotide
atagcagcttcttgtccagc

SEQ ID NO: 1376 - DNA, 20 bp, Artificial Sequence
  Description of Artificial Sequence: Synthetic oligonucleotide
atagcagcttcttgtccagc

SEQ ID NO: 1377 - DNA, 20 bp, Artificial Sequence
  Description of Artificial Sequence: Synthetic oligonucleotide
atagcagcttcttgtccagc

SEQ ID NO: 1378 - DNA, 20 bp, Artificial Sequence
  Description of Artificial Sequence: Synthetic oligonucleotide
atagcagcttcttgtccagc

SEQ ID NO: 1379 - DNA, 20 bp, Artificial Sequence
  Description of Artificial Sequence: Synthetic oligonucleotide
  Description of Combined DNA/RNA Molecule: Synthetic oligonucleotide
cttguccagctttatuggga

SEQ ID NO: 1380 - DNA, 20 bp, Artificial Sequence
  Description of Artificial Sequence: Synthetic oligonucleotide
  Description of Combined DNA/RNA Molecule: Synthetic oligonucleotide
cttguccagctttatuggga

SEQ ID NO: 1381 - DNA, 20 bp, Artificial Sequence
  Description of Artificial Sequence: Synthetic oligonucleotide
  Description of Combined DNA/RNA Molecule: Synthetic oligonucleotide
cttguccagctttatuggga

SEQ ID NO: 1382 - DNA, 20 bp, Artificial Sequence
  Description of Artificial Sequence: Synthetic oligonucleotide
  Description of Combined DNA/RNA Molecule: Synthetic oligonucleotide
cttguccagctttatuggga

SEQ ID NO: 1383 - DNA, 20 bp, Artificial Sequence
  Description of Artificial Sequence: Synthetic oligonucleotide
atagcagcttcttgtccagc

SEQ ID NO: 1384 - DNA, 20 bp, Artificial Sequence
  Description of Artificial Sequence: Synthetic oligonucleotide
atagcagcttcttgtccagc

SEQ ID NO: 1385 - DNA, 20 bp, Artificial Sequence
  Description of Artificial Sequence: Synthetic oligonucleotide
atagcagcttcttgtccagc

SEQ ID NO: 1386 - DNA, 20 bp, Artificial Sequence
  Description of Artificial Sequence: Synthetic oligonucleotide
atagcagcttcttgtccagc

SEQ ID NO: 1387 - DNA, 20 bp, Artificial Sequence
  Description of Artificial Sequence: Synthetic oligonucleotide
cttgtccagctttattggga

SEQ ID NO: 1388 - DNA, 20 bp, Artificial Sequence
  Description of Artificial Sequence: Synthetic oligonucleotide
cttgtccagctttattggga

SEQ ID NO: 1389 - DNA, 20 bp, Artificial Sequence
  Description of Artificial Sequence: Synthetic oligonucleotide
cttgtccagctttattggga

SEQ ID NO: 1390 - DNA, 20 bp, Artificial Sequence
  Description of Artificial Sequence: Synthetic oligonucleotide
cttgtccagctttattggga

SEQ ID NO: 1391 - DNA, 20 bp, Artificial Sequence
  Description of Artificial Sequence: Synthetic oligonucleotide
  Description of Combined DNA/RNA Molecule: Synthetic oligonucleotide
cttguccagctttatuggga

SEQ ID NO: 1392 - DNA, 20 bp, Artificial Sequence
  Description of Artificial Sequence: Synthetic oligonucleotide
  Description of Combined DNA/RNA Molecule: Synthetic oligonucleotide
cttguccagctttatuggga

SEQ ID NO: 1393 - DNA, 20 bp, Artificial Sequence
  Description of Artificial Sequence: Synthetic oligonucleotide
  Description of Combined DNA/RNA Molecule: Synthetic oligonucleotide
cttguccagctttatuggga

SEQ ID NO: 1394 - DNA, 20 bp, Artificial Sequence
  Description of Artificial Sequence: Synthetic oligonucleotide
  Description of Combined DNA/RNA Molecule: Synthetic oligonucleotide
cttguccagctttatuggga

SEQ ID NO: 1395 - DNA, 20 bp, Artificial Sequence
  Description of Artificial Sequence: Synthetic oligonucleotide
atagcagcttcttgtccagc

SEQ ID NO: 1396 - DNA, 20 bp, Artificial Sequence
  Description of Artificial Sequence: Synthetic oligonucleotide
atagcagcttcttgtccagc

SEQ ID NO: 1397 - DNA, 20 bp, Artificial Sequence
  Description of Artificial Sequence: Synthetic oligonucleotide
atagcagcttcttgtccagc

SEQ ID NO: 1398 - DNA, 20 bp, Artificial Sequence
  Description of Artificial Sequence: Synthetic oligonucleotide
atagcagcttcttgtccagc

SEQ ID NO: 1399 - DNA, 20 bp, Artificial Sequence
  Description of Artificial Sequence: Synthetic oligonucleotide
atagcagcttcttgtccagc

SEQ ID NO: 1400 - DNA, 20 bp, Artificial Sequence
  Description of Artificial Sequence: Synthetic oligonucleotide
atagcagcttcttgtccagc

SEQ ID NO: 1401 - DNA, 20 bp, Artificial Sequence
  Description of Artificial Sequence: Synthetic oligonucleotide
atagcagcttcttgtccagc

SEQ ID NO: 1402 - DNA, 20 bp, Artificial Sequence
  Description of Artificial Sequence: Synthetic oligonucleotide
atagcagcttcttgtccagc

SEQ ID NO: 1403 - DNA, 23 bp, Artificial Sequence
  Description of Artificial Sequence: Synthetic oligonucleotide
  Description of Combined DNA/RNA Molecule: Synthetic oligonucleotide
tguccagcuuuauugggaggctu

SEQ ID NO: 1404 - DNA, 23 bp, Artificial Sequence
  Description of Artificial Sequence: Synthetic oligonucleotide
  Description of Combined DNA/RNA Molecule: Synthetic oligonucleotide
tguccagcuuuauugggaggctu

SEQ ID NO: 1405 - DNA, 23 bp, Artificial Sequence
  Description of Artificial Sequence: Synthetic oligonucleotide
  Description of Combined DNA/RNA Molecule: Synthetic oligonucleotide
tguccagcuuuauugggaggctu

SEQ ID NO: 1406 - DNA, 23 bp, Artificial Sequence
  Description of Artificial Sequence: Synthetic oligonucleotide
  Description of Combined DNA/RNA Molecule: Synthetic oligonucleotide
tguccagcuuuauugggaggctu

SEQ ID NO: 1407 - DNA, 23 bp, Artificial Sequence
  Description of Artificial Sequence: Synthetic oligonucleotide
  Description of Combined DNA/RNA Molecule: Synthetic oligonucleotide
tguccagcuuuauugggaggctu

SEQ ID NO: 1408 - DNA, 23 bp, Artificial Sequence
  Description of Artificial Sequence: Synthetic oligonucleotide
  Description of Combined DNA/RNA Molecule: Synthetic oligonucleotide
tguccagcuuuauugggaggctu

SEQ ID NO: 1409 - DNA, 23 bp, Artificial Sequence
  Description of Artificial Sequence: Synthetic oligonucleotide
  Description of Combined DNA/RNA Molecule: Synthetic oligonucleotide
tguccagcuuuauugggaggctu

SEQ ID NO: 1410 - DNA, 23 bp, Artificial Sequence
  Description of Artificial Sequence: Synthetic oligonucleotide
  Description of Combined DNA/RNA Molecule: Synthetic oligonucleotide
tguccagcuuuauugggaggutu

SEQ ID NO: 1411 - DNA, 23 bp, Artificial Sequence
  Description of Artificial Sequence: Synthetic oligonucleotide
  Description of Combined DNA/RNA Molecule: Synthetic oligonucleotide
tguccagcuuuauugggaggctu

SEQ ID NO: 1412 - DNA, 23 bp, Artificial Sequence
  Description of Artificial Sequence: Synthetic oligonucleotide
  Description of Combined DNA/RNA Molecule: Synthetic oligonucleotide
tguccagcuuuauugggaggctu

SEQ ID NO: 1413 - DNA, 23 bp, Artificial Sequence
  Description of Artificial Sequence: Synthetic oligonucleotide
  Description of Combined DNA/RNA Molecule: Synthetic oligonucleotide
tguccagcuuuauugggaggctu

SEQ ID NO: 1414 - DNA, 23 bp, Artificial Sequence
  Description of Artificial Sequence: Synthetic oligonucleotide
  Description of Combined DNA/RNA Molecule: Synthetic oligonucleotide
tguccagcuuuauugggaggctu

SEQ ID NO: 1415 - DNA, 23 bp, Artificial Sequence
  Description of Artificial Sequence: Synthetic oligonucleotide
  Description of Combined DNA/RNA Molecule: Synthetic oligonucleotide
tguccagcuuuauugggaggctu

SEQ ID NO: 1416 - DNA, 23 bp, Artificial Sequence
  Description of Artificial Sequence: Synthetic oligonucleotide
  Description of Combined DNA/RNA Molecule: Synthetic oligonucleotide
tguccagcuuuauugggaggctu

SEQ ID NO: 1417 - DNA, 23 bp, Artificial Sequence
  Description of Artificial Sequence: Synthetic oligonucleotide
  Description of Combined DNA/RNA Molecule: Synthetic oligonucleotide
tguccagcuuuauugggaggctu

SEQ ID NO: 1418 - DNA, 23 bp, Artificial Sequence
  Description of Artificial Sequence: Synthetic oligonucleotide
  Description of Combined DNA/RNA Molecule: Synthetic oligonucleotide
tguccagcuuuauugggaggctu

SEQ ID NO: 1419 - DNA, 23 bp, Artificial Sequence
  Description of Artificial Sequence: Synthetic oligonucleotide
  Description of Combined DNA/RNA Molecule: Synthetic oligonucleotide
tguccagcuuuauugggaggctu

SEQ ID NO: 1420 - DNA, 23 bp, Artificial Sequence
  Description of Artificial Sequence: Synthetic oligonucleotide
  Description of Combined DNA/RNA Molecule: Synthetic oligonucleotide
tguccagcuuuauugggaggctu

SEQ ID NO: 1421 - DNA, 23 bp, Artificial Sequence
  Description of Artificial Sequence: Synthetic oligonucleotide
  Description of Combined DNA/RNA Molecule: Synthetic oligonucleotide
tguccagcuuuauugggaggctu

SEQ ID NO: 1422 - DNA, 23 bp, Artificial Sequence
  Description of Artificial Sequence: Synthetic oligonucleotide
  Description of Combined DNA/RNA Molecule: Synthetic oligonucleotide
tguccagcuuuauugggaggctu

SEQ ID NO: 1423 - DNA, 23 bp, Artificial Sequence
  Description of Artificial Sequence: Synthetic oligonucleotide
  Description of Combined DNA/RNA Molecule: Synthetic oligonucleotide
tguccagcuuuauugggaggctu

SEQ ID NO: 1424 - DNA, 23 bp, Artificial Sequence
  Description of Artificial Sequence: Synthetic oligonucleotide
  Description of Combined DNA/RNA Molecule: Synthetic oligonucleotide
tguccagcuuuauugggaggctu

SEQ ID NO: 1425 - DNA, 23 bp, Artificial Sequence
  Description of Artificial Sequence: Synthetic oligonucleotide
  Description of Combined DNA/RNA Molecule: Synthetic oligonucleotide
tguccagcuuuauugggaggctu

SEQ ID NO: 1426 - DNA, 23 bp, Artificial Sequence
  Description of Artificial Sequence: Synthetic oligonucleotide
  Description of Combined DNA/RNA Molecule: Synthetic oligonucleotide
tguccagcuuuauugggaggctu

SEQ ID NO: 1427 - DNA, 23 bp, Artificial Sequence
  Description of Artificial Sequence: Synthetic oligonucleotide
  Description of Combined DNA/RNA Molecule: Synthetic oligonucleotide
tguccagcuuuauugggaggctu

SEQ ID NO: 1428 - DNA, 23 bp, Artificial Sequence
  Description of Artificial Sequence: Synthetic oligonucleotide
  Description of Combined DNA/RNA Molecule: Synthetic oligonucleotide
tguccagcuuuauugggaggctu

SEQ ID NO: 1429 - DNA, 23 bp, Artificial Sequence
  Description of Artificial Sequence: Synthetic oligonucleotide
  Description of Combined DNA/RNA Molecule: Synthetic oligonucleotide
tguccagcuuuauugggaggctu

SEQ ID NO: 1430 - DNA, 23 bp, Artificial Sequence
  Description of Artificial Sequence: Synthetic oligonucleotide
  Description of Combined DNA/RNA Molecule: Synthetic oligonucleotide
tguccagcuuuauugggaggctu

SEQ ID NO: 1431 - DNA, 23 bp, Artificial Sequence
  Description of Artificial Sequence: Synthetic oligonucleotide
  Description of Combined DNA/RNA Molecule: Synthetic oligonucleotide
tguccagcuuuauugggaggctu

SEQ ID NO: 1432 - DNA, 23 bp, Artificial Sequence
  Description of Artificial Sequence: Synthetic oligonucleotide
  Description of Combined DNA/RNA Molecule: Synthetic oligonucleotide
tguccagcuuuauugggaggctu

SEQ ID NO: 1433 - DNA, 23 bp, Artificial Sequence
  Description of Artificial Sequence: Synthetic oligonucleotide
  Description of Combined DNA/RNA Molecule: Synthetic oligonucleotide
tguccagcuuuauugggaggctu

SEQ ID NO: 1434 - DNA, 23 bp, Artificial Sequence
  Description of Artificial Sequence: Synthetic oligonucleotide
  Description of Combined DNA/RNA Molecule: Synthetic oligonucleotide
tguccagcuuuauugggaggctu

SEQ ID NO: 1435 - DNA, 23 bp, Artificial Sequence
  Description of Artificial Sequence: Synthetic oligonucleotide
  Description of Combined DNA/RNA Molecule: Synthetic oligonucleotide
tguccagcuuuauugggaggctu

SEQ ID NO: 1436 - DNA, 23 bp, Artificial Sequence
  Description of Artificial Sequence: Synthetic oligonucleotide
  Description of Combined DNA/RNA Molecule: Synthetic oligonucleotide
tguccagcuuuauugggaggctu

SEQ ID NO: 1437 - DNA, 23 bp, Artificial Sequence
  Description of Artificial Sequence: Synthetic oligonucleotide
  Description of Combined DNA/RNA Molecule: Synthetic oligonucleotide
tguccagcuuuauugggaggctu

SEQ ID NO: 1438 - DNA, 23 bp, Artificial Sequence
  Description of Artificial Sequence: Synthetic oligonucleotide
  Description of Combined DNA/RNA Molecule: Synthetic oligonucleotide
tguccagcuuuauugggaggctu

SEQ ID NO: 1439 - DNA, 23 bp, Artificial Sequence
  Description of Artificial Sequence: Synthetic oligonucleotide
  Description of Combined DNA/RNA Molecule: Synthetic oligonucleotide
tguccagcuuuauugggaggctu

SEQ ID NO: 1440 - DNA, 23 bp, Artificial Sequence
  Description of Artificial Sequence: Synthetic oligonucleotide
  Description of Combined DNA/RNA Molecule: Synthetic oligonucleotide
tguccagcuuuauugggaggctu

SEQ ID NO: 1441 - DNA, 23 bp, Artificial Sequence
  Description of Artificial Sequence: Synthetic oligonucleotide
  Description of Combined DNA/RNA Molecule: Synthetic oligonucleotide
tguccagcuuuauugggaggctu

SEQ ID NO: 1442 - DNA, 23 bp, Artificial Sequence
  Description of Artificial Sequence: Synthetic oligonucleotide
  Description of Combined DNA/RNA Molecule: Synthetic oligonucleotide
tguccagcuuuauugggaggctu

SEQ ID NO: 1443 - DNA, 23 bp, Artificial Sequence
  Description of Artificial Sequence: Synthetic oligonucleotide
  Description of Combined DNA/RNA Molecule: Synthetic oligonucleotide
tguccagcuuuauugggaggctu

SEQ ID NO: 1444 - DNA, 23 bp, Artificial Sequence
  Description of Artificial Sequence: Synthetic oligonucleotide
  Description of Combined DNA/RNA Molecule: Synthetic oligonucleotide
tguccagcuuuauugggaggctu

SEQ ID NO: 1445 - DNA, 23 bp, Artificial Sequence
  Description of Artificial Sequence: Synthetic oligonucleotide
  Description of Combined DNA/RNA Molecule: Synthetic oligonucleotide
tguccagcuuuauugggaggctu

SEQ ID NO: 1446 - DNA, 23 bp, Artificial Sequence
  Description of Artificial Sequence: Synthetic oligonucleotide
  Description of Combined DNA/RNA Molecule: Synthetic oligonucleotide
tguccagcuuuauugggaggctu

SEQ ID NO: 1447 - DNA, 23 bp, Artificial Sequence
  Description of Artificial Sequence: Synthetic oligonucleotide
  Description of Combined DNA/RNA Molecule: Synthetic oligonucleotide
tguccagcuuuauugggaggctu

SEQ ID NO: 1448 - DNA, 23 bp, Artificial Sequence
  Description of Artificial Sequence: Synthetic oligonucleotide
  Description of Combined DNA/RNA Molecule: Synthetic oligonucleotide
tguccagcuuuauugggaggctu

SEQ ID NO: 1449 - DNA, 23 bp, Artificial Sequence
  Description of Artificial Sequence: Synthetic oligonucleotide
  Description of Combined DNA/RNA Molecule: Synthetic oligonucleotide
tguccagcuuuauugggaggctu

SEQ ID NO: 1450 - DNA, 23 bp, Artificial Sequence
  Description of Artificial Sequence: Synthetic oligonucleotide
  Description of Combined DNA/RNA Molecule: Synthetic oligonucleotide
tguccagcuuuauugggaggctu

SEQ ID NO: 1451 - DNA, 23 bp, Artificial Sequence
  Description of Artificial Sequence: Synthetic oligonucleotide
  Description of Combined DNA/RNA Molecule: Synthetic oligonucleotide
tguccagcuuuauugggaggctu

SEQ ID NO: 1452 - DNA, 23 bp, Artificial Sequence
  Description of Artificial Sequence: Synthetic oligonucleotide
  Description of Combined DNA/RNA Molecule: Synthetic oligonucleotide
tguccagcuuuauugggaggctu

SEQ ID NO: 1453 - DNA, 23 bp, Artificial Sequence
  Description of Artificial Sequence: Synthetic oligonucleotide
  Description of Combined DNA/RNA Molecule: Synthetic oligonucleotide
tguccagcuuuauugggaggctu

SEQ ID NO: 1454 - DNA, 23 bp, Artificial Sequence
  Description of Artificial Sequence: Synthetic oligonucleotide
  Description of Combined DNA/RNA Molecule: Synthetic oligonucleotide
tguccagcuuuauugggaggctu

SEQ ID NO: 1455 - DNA, 23 bp, Artificial Sequence
  Description of Artificial Sequence: Synthetic oligonucleotide
  Description of Combined DNA/RNA Molecule: Synthetic oligonucleotide
tguccagcuuuauugggaggctu

SEQ ID NO: 1456 - DNA, 23 bp, Artificial Sequence
  Description of Artificial Sequence: Synthetic oligonucleotide
  Description of Combined DNA/RNA Molecule: Synthetic oligonucleotide
tguccagcuuuauugggaggctu

SEQ ID NO: 1457 - DNA, 23 bp, Artificial Sequence
  Description of Artificial Sequence: Synthetic oligonucleotide
  Description of Combined DNA/RNA Molecule: Synthetic oligonucleotide
tguccagcuuuauugggaggctu

SEQ ID NO: 1458 - DNA, 23 bp, Artificial Sequence
  Description of Artificial Sequence: Synthetic oligonucleotide
  Description of Combined DNA/RNA Molecule: Synthetic oligonucleotide
tguccagcuuuauugggaggctu

SEQ ID NO: 1459 - DNA, 23 bp, Artificial Sequence
  Description of Artificial Sequence: Synthetic oligonucleotide
  Description of Combined DNA/RNA Molecule: Synthetic oligonucleotide
tguccagcuuuauugggaggctu

SEQ ID NO: 1460 - DNA, 23 bp, Artificial Sequence
  Description of Artificial Sequence: Synthetic oligonucleotide
  Description of Combined DNA/RNA Molecule: Synthetic oligonucleotide
tguccagcuuuauugggaggctu

SEQ ID NO: 1461 - DNA, 23 bp, Artificial Sequence
  Description of Artificial Sequence: Synthetic oligonucleotide
  Description of Combined DNA/RNA Molecule: Synthetic oligonucleotide
tguccagcuuuauugggaggctu

SEQ ID NO: 1462 - DNA, 23 bp, Artificial Sequence
  Description of Artificial Sequence: Synthetic oligonucleotide
  Description of Combined DNA/RNA Molecule: Synthetic oligonucleotide
tguccagcuuuauugggaggctu

SEQ ID NO: 1463 - DNA, 23 bp, Artificial Sequence
  Description of Artificial Sequence: Synthetic oligonucleotide
  Description of Combined DNA/RNA Molecule: Synthetic oligonucleotide
tguccagcuuuauugggaggctu

SEQ ID NO: 1464 - DNA, 23 bp, Artificial Sequence
  Description of Artificial Sequence: Synthetic oligonucleotide
  Description of Combined DNA/RNA Molecule: Synthetic oligonucleotide
tguccagcuuuauugggaggctu

SEQ ID NO: 1465 - DNA, 23 bp, Artificial Sequence
  Description of Artificial Sequence: Synthetic oligonucleotide
  Description of Combined DNA/RNA Molecule: Synthetic oligonucleotide
tguccagcuuuauugggaggctu

SEQ ID NO: 1466 - DNA, 23 bp, Artificial Sequence
  Description of Artificial Sequence: Synthetic oligonucleotide
  Description of Combined DNA/RNA Molecule: Synthetic oligonucleotide
tguccagcuuuauugggaggctu

SEQ ID NO: 1467 - DNA, 23 bp, Artificial Sequence
  Description of Artificial Sequence: Synthetic oligonucleotide
  Description of Combined DNA/RNA Molecule: Synthetic oligonucleotide
tguccagcuuuauugggaggctu

SEQ ID NO: 1468 - DNA, 23 bp, Artificial Sequence
  Description of Artificial Sequence: Synthetic oligonucleotide
  Description of Combined DNA/RNA Molecule: Synthetic oligonucleotide
tguccagcuuuauugggaggctu

SEQ ID NO: 1469 - DNA, 23 bp, Artificial Sequence
  Description of Artificial Sequence: Synthetic oligonucleotide
  Description of Combined DNA/RNA Molecule: Synthetic oligonucleotide
tguccagcuuuauugggaggctu

SEQ ID NO: 1470 - DNA, 23 bp, Artificial Sequence
  Description of Artificial Sequence: Synthetic oligonucleotide
  Description of Combined DNA/RNA Molecule: Synthetic oligonucleotide
tguccagcuuuauugggaggctu

SEQ ID NO: 1471 - DNA, 23 bp, Artificial Sequence
  Description of Artificial Sequence: Synthetic oligonucleotide
  Description of Combined DNA/RNA Molecule: Synthetic oligonucleotide
tguccagcuuuauugggaggctu

SEQ ID NO: 1472 - DNA, 23 bp, Artificial Sequence
  Description of Artificial Sequence: Synthetic oligonucleotide
  Description of Combined DNA/RNA Molecule: Synthetic oligonucleotide
tguccagcuuuauugggaggctu

SEQ ID NO: 1473 - DNA, 23 bp, Artificial Sequence
  Description of Artificial Sequence: Synthetic oligonucleotide
  Description of Combined DNA/RNA Molecule: Synthetic oligonucleotide
tguccagcuuuauugggaggctu

SEQ ID NO: 1474 - DNA, 23 bp, Artificial Sequence
  Description of Artificial Sequence: Synthetic oligonucleotide
  Description of Combined DNA/RNA Molecule: Synthetic oligonucleotide
tguccagcuuuauugggaggctu

SEQ ID NO: 1475 - DNA, 23 bp, Artificial Sequence
  Description of Artificial Sequence: Synthetic oligonucleotide
  Description of Combined DNA/RNA Molecule: Synthetic oligonucleotide
tguccagcuuuauugggaggctu

SEQ ID NO: 1476 - DNA, 23 bp, Artificial Sequence
  Description of Artificial Sequence: Synthetic oligonucleotide
  Description of Combined DNA/RNA Molecule: Synthetic oligonucleotide
tagcuucuuguccagcuuuautu

SEQ ID NO: 1477 - DNA, 23 bp, Artificial Sequence
  Description of Artificial Sequence: Synthetic oligonucleotide
  Description of Combined DNA/RNA Molecule: Synthetic oligonucleotide
tguccagcuuuauugggaggctu

SEQ ID NO: 1478 - DNA, 23 bp, Artificial Sequence
  Description of Artificial Sequence: Synthetic oligonucleotide
  Description of Combined DNA/RNA Molecule: Synthetic oligonucleotide
tagcuucuuguccagcuuuautu

SEQ ID NO: 1479 - DNA, 23 bp, Artificial Sequence
  Description of Artificial Sequence: Synthetic oligonucleotide
  Description of Combined DNA/RNA Molecule: Synthetic oligonucleotide
tguccagcuuuauugggaggctu

SEQ ID NO: 1480 - DNA, 23 bp, Artificial Sequence
  Description of Artificial Sequence: Synthetic oligonucleotide
  Description of Combined DNA/RNA Molecule: Synthetic oligonucleotide
tagcuucuuguccagcuuuautu

SEQ ID NO: 1481 - DNA, 23 bp, Artificial Sequence
  Description of Artificial Sequence: Synthetic oligonucleotide
  Description of Combined DNA/RNA Molecule: Synthetic oligonucleotide
tguccagcuuuauugggaggctu

SEQ ID NO: 1482 - DNA, 23 bp, Artificial Sequence
  Description of Artificial Sequence: Synthetic oligonucleotide
  Description of Combined DNA/RNA Molecule: Synthetic oligonucleotide
tagcuucuuguccagcuuuautu

SEQ ID NO: 1483 - DNA, 23 bp, Artificial Sequence
  Description of Artificial Sequence: Synthetic oligonucleotide
  Description of Combined DNA/RNA Molecule: Synthetic oligonucleotide
tguccagcuuuauugggaggctu

SEQ ID NO: 1484 - DNA, 23 bp, Artificial Sequence
  Description of Artificial Sequence: Synthetic oligonucleotide
  Description of Combined DNA/RNA Molecule: Synthetic oligonucleotide
tagcuucuuguccagcuuuautu

SEQ ID NO: 1485 - DNA, 23 bp, Artificial Sequence
  Description of Artificial Sequence: Synthetic oligonucleotide
  Description of Combined DNA/RNA Molecule: Synthetic oligonucleotide
tguccagcuuuauugggaggctu

SEQ ID NO: 1486 - DNA, 23 bp, Artificial Sequence
  Description of Artificial Sequence: Synthetic oligonucleotide
  Description of Combined DNA/RNA Molecule: Synthetic oligonucleotide
tagcuucuuguccagcuuuautu

SEQ ID NO: 1487 - DNA, 23 bp, Artificial Sequence
  Description of Artificial Sequence: Synthetic oligonucleotide
  Description of Combined DNA/RNA Molecule: Synthetic oligonucleotide
tguccagcuuuauugggaggctu

SEQ ID NO: 1488 - DNA, 23 bp, Artificial Sequence
  Description of Artificial Sequence: Synthetic oligonucleotide
  Description of Combined DNA/RNA Molecule: Synthetic oligonucleotide
tagcuucuuguccagcuuuautu

SEQ ID NO: 1489 - DNA, 23 bp, Artificial Sequence
  Description of Artificial Sequence: Synthetic oligonucleotide
  Description of Combined DNA/RNA Molecule: Synthetic oligonucleotide
tguccagcuuuauugggaggctu

SEQ ID NO: 1490 - DNA, 23 bp, Artificial Sequence
  Description of Artificial Sequence: Synthetic oligonucleotide
  Description of Combined DNA/RNA Molecule: Synthetic oligonucleotide
tagcuucuuguccagcuuuautu

SEQ ID NO: 1491 - DNA, 23 bp, Artificial Sequence
  Description of Artificial Sequence: Synthetic oligonucleotide
  Description of Combined DNA/RNA Molecule: Synthetic oligonucleotide
tguccagcuuuauugggaggctu

SEQ ID NO: 1492 - DNA, 23 bp, Artificial Sequence
  Description of Artificial Sequence: Synthetic oligonucleotide
  Description of Combined DNA/RNA Molecule: Synthetic oligonucleotide
tagcuucuuguccagcuuuautu

SEQ ID NO: 1493 - DNA, 23 bp, Artificial Sequence
  Description of Artificial Sequence: Synthetic oligonucleotide
  Description of Combined DNA/RNA Molecule: Synthetic oligonucleotide
tguccagcuuuauugggaggctu

SEQ ID NO: 1494 - DNA, 23 bp, Artificial Sequence
  Description of Artificial Sequence: Synthetic oligonucleotide
  Description of Combined DNA/RNA Molecule: Synthetic oligonucleotide
tagcuucuuguccagcuuuautu

SEQ ID NO: 1495 - DNA, 23 bp, Artificial Sequence
  Description of Artificial Sequence: Synthetic oligonucleotide
  Description of Combined DNA/RNA Molecule: Synthetic oligonucleotide
tguccagcuuuauugggaggctu

SEQ ID NO: 1496 - DNA, 23 bp, Artificial Sequence
  Description of Artificial Sequence: Synthetic oligonucleotide
  Description of Combined DNA/RNA Molecule: Synthetic oligonucleotide
tagcuucuuguccagcuuuautu

SEQ ID NO: 1497 - DNA, 23 bp, Artificial Sequence
  Description of Artificial Sequence: Synthetic oligonucleotide
  Description of Combined DNA/RNA Molecule: Synthetic oligonucleotide
tguccagcuuuauugggaggctu

SEQ ID NO: 1498 - DNA, 23 bp, Artificial Sequence
  Description of Artificial Sequence: Synthetic oligonucleotide
  Description of Combined DNA/RNA Molecule: Synthetic oligonucleotide
tagcuucuuguccagcuuuautu

SEQ ID NO: 1499 - DNA, 23 bp, Artificial Sequence
  Description of Artificial Sequence: Synthetic oligonucleotide
  Description of Combined DNA/RNA Molecule: Synthetic oligonucleotide
tagcuucuuguccagcuuuautu

SEQ ID NO: 1500 - DNA, 23 bp, Artificial Sequence
  Description of Artificial Sequence: Synthetic oligonucleotide
  Description of Combined DNA/RNA Molecule: Synthetic oligonucleotide
tguccagcuuuauugggaggctu

SEQ ID NO: 1501 - DNA, 23 bp, Artificial Sequence
  Description of Artificial Sequence: Synthetic oligonucleotide
  Description of Combined DNA/RNA Molecule: Synthetic oligonucleotide
tagcuucuuguccagcuuuautu

SEQ ID NO: 1502 - DNA, 23 bp, Artificial Sequence
  Description of Artificial Sequence: Synthetic oligonucleotide
  Description of Combined DNA/RNA Molecule: Synthetic oligonucleotide
tguccagcuuuauugggaggctu

SEQ ID NO: 1503 - DNA, 23 bp, Artificial Sequence
  Description of Artificial Sequence: Synthetic oligonucleotide
  Description of Combined DNA/RNA Molecule: Synthetic oligonucleotide
tagcuucuuguccagcuuuautu

SEQ ID NO: 1504 - DNA, 23 bp, Artificial Sequence
  Description of Artificial Sequence: Synthetic oligonucleotide
  Description of Combined DNA/RNA Molecule: Synthetic oligonucleotide
tguccagcuuuauugggaggctu

SEQ ID NO: 1505 - DNA, 23 bp, Artificial Sequence
  Description of Artificial Sequence: Synthetic oligonucleotide
  Description of Combined DNA/RNA Molecule: Synthetic oligonucleotide
tagcuucuuguccagcuuuautu

SEQ ID NO: 1506 - DNA, 23 bp, Artificial Sequence
  Description of Artificial Sequence: Synthetic oligonucleotide
  Description of Combined DNA/RNA Molecule: Synthetic oligonucleotide
tguccagcuuuauugggaggctu

SEQ ID NO: 1507 - DNA, 23 bp, Artificial Sequence
  Description of Artificial Sequence: Synthetic oligonucleotide
  Description of Combined DNA/RNA Molecule: Synthetic oligonucleotide
tagcuucuuguccagcuuuautu

SEQ ID NO: 1508 - DNA, 23 bp, Artificial Sequence
  Description of Artificial Sequence: Synthetic oligonucleotide
  Description of Combined DNA/RNA Molecule: Synthetic oligonucleotide
tguccagcuuuauugggaggctu

SEQ ID NO: 1509 - DNA, 23 bp, Artificial Sequence
  Description of Artificial Sequence: Synthetic oligonucleotide
  Description of Combined DNA/RNA Molecule: Synthetic oligonucleotide
tagcuucuuguccagcuuuautu

SEQ ID NO: 1510 - DNA, 23 bp, Artificial Sequence
  Description of Artificial Sequence: Synthetic oligonucleotide
  Description of Combined DNA/RNA Molecule: Synthetic oligonucleotide
tguccagcuuuauugggaggctu

SEQ ID NO: 1511 - DNA, 23 bp, Artificial Sequence
  Description of Artificial Sequence: Synthetic oligonucleotide
  Description of Combined DNA/RNA Molecule: Synthetic oligonucleotide
tagcuucuuguccagcuuuautu

SEQ ID NO: 1512 - DNA, 23 bp, Artificial Sequence
  Description of Artificial Sequence: Synthetic oligonucleotide
  Description of Combined DNA/RNA Molecule: Synthetic oligonucleotide
tguccagcuuuauugggaggctu

SEQ ID NO: 1513 - DNA, 23 bp, Artificial Sequence
  Description of Artificial Sequence: Synthetic oligonucleotide
  Description of Combined DNA/RNA Molecule: Synthetic oligonucleotide
tagcuucuuguccagcuuuautu

SEQ ID NO: 1514 - DNA, 23 bp, Artificial Sequence
  Description of Artificial Sequence: Synthetic oligonucleotide
  Description of Combined DNA/RNA Molecule: Synthetic oligonucleotide
tguccagcuuuauugggaggctu

SEQ ID NO: 1515 - DNA, 23 bp, Artificial Sequence
  Description of Artificial Sequence: Synthetic oligonucleotide
  Description of Combined DNA/RNA Molecule: Synthetic oligonucleotide
tagcuucuuguccagcuuuautu

SEQ ID NO: 1516 - DNA, 23 bp, Artificial Sequence
  Description of Artificial Sequence: Synthetic oligonucleotide
  Description of Combined DNA/RNA Molecule: Synthetic oligonucleotide
tguccagcuuuauugggaggctu

SEQ ID NO: 1517 - DNA, 23 bp, Artificial Sequence
  Description of Artificial Sequence: Synthetic oligonucleotide
  Description of Combined DNA/RNA Molecule: Synthetic oligonucleotide
tagcuucuuguccagcuuuautu

SEQ ID NO: 1518 - DNA, 23 bp, Artificial Sequence
  Description of Artificial Sequence: Synthetic oligonucleotide
  Description of Combined DNA/RNA Molecule: Synthetic oligonucleotide
tguccagcuuuauugggaggctu

SEQ ID NO: 1519 - DNA, 23 bp, Artificial Sequence
  Description of Artificial Sequence: Synthetic oligonucleotide
  Description of Combined DNA/RNA Molecule: Synthetic oligonucleotide
tagcuucuuguccagcuuuautu

SEQ ID NO: 1520 - DNA, 23 bp, Artificial Sequence
  Description of Artificial Sequence: Synthetic oligonucleotide
  Description of Combined DNA/RNA Molecule: Synthetic oligonucleotide
tguccagcuuuauugggaggctu

SEQ ID NO: 1521 - DNA, 23 bp, Artificial Sequence
  Description of Artificial Sequence: Synthetic oligonucleotide
  Description of Combined DNA/RNA Molecule: Synthetic oligonucleotide
tagcuucuuguccagcuuuautu

SEQ ID NO: 1522 - DNA, 23 bp, Artificial Sequence
  Description of Artificial Sequence: Synthetic oligonucleotide
  Description of Combined DNA/RNA Molecule: Synthetic oligonucleotide
tguccagcuuuauugggaggctu

SEQ ID NO: 1523 - DNA, 23 bp, Artificial Sequence
  Description of Artificial Sequence: Synthetic oligonucleotide
  Description of Combined DNA/RNA Molecule: Synthetic oligonucleotide
tagcuucuuguccagcuuuautu

SEQ ID NO: 1524 - DNA, 23 bp, Artificial Sequence
  Description of Artificial Sequence: Synthetic oligonucleotide
  Description of Combined DNA/RNA Molecule: Synthetic oligonucleotide
tguccagcuuuauugggaggctu

SEQ ID NO: 1525 - DNA, 23 bp, Artificial Sequence
  Description of Artificial Sequence: Synthetic oligonucleotide
  Description of Combined DNA/RNA Molecule: Synthetic oligonucleotide
tagcuucuuguccagcuuuautu

SEQ ID NO: 1526 - DNA, 23 bp, Artificial Sequence
  Description of Artificial Sequence: Synthetic oligonucleotide
  Description of Combined DNA/RNA Molecule: Synthetic oligonucleotide
tguccagcuuuauugggaggctu

SEQ ID NO: 1527 - DNA, 23 bp, Artificial Sequence
  Description of Artificial Sequence: Synthetic oligonucleotide
  Description of Combined DNA/RNA Molecule: Synthetic oligonucleotide
tagcuucuuguccagcuuuautu

SEQ ID NO: 1528 - DNA, 23 bp, Artificial Sequence
  Description of Artificial Sequence: Synthetic oligonucleotide
  Description of Combined DNA/RNA Molecule: Synthetic oligonucleotide
tguccagcuuuauugggaggctu

SEQ ID NO: 1529 - DNA, 23 bp, Artificial Sequence
  Description of Artificial Sequence: Synthetic oligonucleotide
  Description of Combined DNA/RNA Molecule: Synthetic oligonucleotide
tagcuucuuguccagcuuuautu

SEQ ID NO: 1530 - DNA, 23 bp, Artificial Sequence
  Description of Artificial Sequence: Synthetic oligonucleotide
  Description of Combined DNA/RNA Molecule: Synthetic oligonucleotide
tguccagcuuuauugggaggctu

SEQ ID NO: 1531 - DNA, 23 bp, Artificial Sequence
  Description of Artificial Sequence: Synthetic oligonucleotide
  Description of Combined DNA/RNA Molecule: Synthetic oligonucleotide
tguccagcuuuauugggaggctu

SEQ ID NO: 1532 - DNA, 23 bp, Artificial Sequence
  Description of Artificial Sequence: Synthetic oligonucleotide
  Description of Combined DNA/RNA Molecule: Synthetic oligonucleotide
tguccagcuuuauugggaggctu

SEQ ID NO: 1533 - DNA, 23 bp, Artificial Sequence
  Description of Artificial Sequence: Synthetic oligonucleotide
  Description of Combined DNA/RNA Molecule: Synthetic oligonucleotide
tguccagcuuuauugggaggctu

SEQ ID NO: 1534 - DNA, 23 bp, Artificial Sequence
  Description of Artificial Sequence: Synthetic oligonucleotide
  Description of Combined DNA/RNA Molecule: Synthetic oligonucleotide
tguccagcuuuauugggaggctu

SEQ ID NO: 1535 - DNA, 23 bp, Artificial Sequence
  Description of Artificial Sequence: Synthetic oligonucleotide
  Description of Combined DNA/RNA Molecule: Synthetic oligonucleotide
tguccagcuuuauugggaggctu

SEQ ID NO: 1536 - DNA, 23 bp, Artificial Sequence
  Description of Artificial Sequence: Synthetic oligonucleotide
  Description of Combined DNA/RNA Molecule: Synthetic oligonucleotide
tguccagcuuuauugggaggctu

SEQ ID NO: 1537 - DNA, 23 bp, Artificial Sequence
  Description of Artificial Sequence: Synthetic oligonucleotide
  Description of Combined DNA/RNA Molecule: Synthetic oligonucleotide
tguccagcuuuauugggaggctu

SEQ ID NO: 1538 - DNA, 23 bp, Artificial Sequence
  Description of Artificial Sequence: Synthetic oligonucleotide
  Description of Combined DNA/RNA Molecule: Synthetic oligonucleotide
tguccagcuuuauugggaggctu

SEQ ID NO: 1539 - DNA, 23 bp, Artificial Sequence
  Description of Artificial Sequence: Synthetic oligonucleotide
  Description of Combined DNA/RNA Molecule: Synthetic oligonucleotide
tguccagcuuuauugggaggctu

SEQ ID NO: 1540 - DNA, 23 bp, Artificial Sequence
  Description of Artificial Sequence: Synthetic oligonucleotide
  Description of Combined DNA/RNA Molecule: Synthetic oligonucleotide
tguccagcuuuauugggaggctu

SEQ ID NO: 1541 - DNA, 23 bp, Artificial Sequence
  Description of Artificial Sequence: Synthetic oligonucleotide
  Description of Combined DNA/RNA Molecule: Synthetic oligonucleotide
tguccagcuuuauugggaggctu

SEQ ID NO: 1542 - DNA, 23 bp, Artificial Sequence
  Description of Artificial Sequence: Synthetic oligonucleotide
  Description of Combined DNA/RNA Molecule: Synthetic oligonucleotide
tguccagcuuuauugggaggctu

SEQ ID NO: 1543 - DNA, 23 bp, Artificial Sequence
  Description of Artificial Sequence: Synthetic oligonucleotide
  Description of Combined DNA/RNA Molecule: Synthetic oligonucleotide
tguccagcuuuauugggaggctu

SEQ ID NO: 1544 - DNA, 23 bp, Artificial Sequence
  Description of Artificial Sequence: Synthetic oligonucleotide
  Description of Combined DNA/RNA Molecule: Synthetic oligonucleotide
tguccagcuuuauugggaggctu

SEQ ID NO: 1545 - DNA, 23 bp, Artificial Sequence
  Description of Artificial Sequence: Synthetic oligonucleotide
  Description of Combined DNA/RNA Molecule: Synthetic oligonucleotide
tguccagcuuuauugggaggctu

SEQ ID NO: 1546 - DNA, 23 bp, Artificial Sequence
  Description of Artificial Sequence: Synthetic oligonucleotide
  Description of Combined DNA/RNA Molecule: Synthetic oligonucleotide
tguccagcuuuauugggaggctu

SEQ ID NO: 1547 - DNA, 23 bp, Artificial Sequence
  Description of Artificial Sequence: Synthetic oligonucleotide
  Description of Combined DNA/RNA Molecule: Synthetic oligonucleotide
tguccagcuuuauugggaggctu

SEQ ID NO: 1548 - DNA, 23 bp, Artificial Sequence
  Description of Artificial Sequence: Synthetic oligonucleotide
  Description of Combined DNA/RNA Molecule: Synthetic oligonucleotide
tguccagcuuuauugggaggctu

SEQ ID NO: 1549 - DNA, 23 bp, Artificial Sequence
  Description of Artificial Sequence: Synthetic oligonucleotide
  Description of Combined DNA/RNA Molecule: Synthetic oligonucleotide
tguccagcuuuauugggaggctu

SEQ ID NO: 1550 - DNA, 23 bp, Artificial Sequence
  Description of Artificial Sequence: Synthetic oligonucleotide
  Description of Combined DNA/RNA Molecule: Synthetic oligonucleotide
tguccagcuuuauugggaggctu

SEQ ID NO: 1551 - DNA, 22 bp, Artificial Sequence
  Description of Artificial Sequence: Synthetic oligonucleotide
  Description of Combined DNA/RNA Molecule: Synthetic oligonucleotide
guccagcuuuauugggaggctu

SEQ ID NO: 1552 - DNA, 22 bp, Artificial Sequence
  Description of Artificial Sequence: Synthetic oligonucleotide
  Description of Combined DNA/RNA Molecule: Synthetic oligonucleotide
tuccagcuuuauugggaggctu

SEQ ID NO: 1553 - DNA, 22 bp, Artificial Sequence
  Description of Artificial Sequence: Synthetic oligonucleotide
  Description of Combined DNA/RNA Molecule: Synthetic oligonucleotide
tgccagcuuuauugggaggctu

SEQ ID NO: 1554 - DNA, 22 bp, Artificial Sequence
  Description of Artificial Sequence: Synthetic oligonucleotide
  Description of Combined DNA/RNA Molecule: Synthetic oligonucleotide
tgucagcuuuauugggaggctu

SEQ ID NO: 1555 - DNA, 22 bp, Artificial Sequence
  Description of Artificial Sequence: Synthetic oligonucleotide
  Description of Combined DNA/RNA Molecule: Synthetic oligonucleotide
tgucagcuuuauugggaggctu

SEQ ID NO: 1556 - DNA, 22 bp, Artificial Sequence
  Description of Artificial Sequence: Synthetic oligonucleotide
  Description of Combined DNA/RNA Molecule: Synthetic oligonucleotide
tguccgcuuuauugggaggctu

SEQ ID NO: 1557 - DNA, 22 bp, Artificial Sequence
  Description of Artificial Sequence: Synthetic oligonucleotide
  Description of Combined DNA/RNA Molecule: Synthetic oligonucleotide
tguccacuuuauugggaggctu

SEQ ID NO: 1558 - DNA, 22 bp, Artificial Sequence
  Description of Artificial Sequence: Synthetic oligonucleotide
  Description of Combined DNA/RNA Molecule: Synthetic oligonucleotide
tguccaguuuauugggaggctu

SEQ ID NO: 1559 - DNA, 22 bp, Artificial Sequence
  Description of Artificial Sequence: Synthetic oligonucleotide
  Description of Combined DNA/RNA Molecule: Synthetic oligonucleotide
tguccagcuuauugggaggctu

SEQ ID NO: 1560 - DNA, 22 bp, Artificial Sequence
  Description of Artificial Sequence: Synthetic oligonucleotide
  Description of Combined DNA/RNA Molecule: Synthetic oligonucleotide
tguccagcuuauugggaggctu

SEQ ID NO: 1561 - DNA, 22 bp, Artificial Sequence
  Description of Artificial Sequence: Synthetic oligonucleotide
  Description of Combined DNA/RNA Molecule: Synthetic oligonucleotide
tguccagcuuauugggaggctu

SEQ ID NO: 1562 - DNA, 22 bp, Artificial Sequence
  Description of Artificial Sequence: Synthetic oligonucleotide
  Description of Combined DNA/RNA Molecule: Synthetic oligonucleotide
guccagcuuuauugggaggctu

SEQ ID NO: 1563 - DNA, 22 bp, Artificial Sequence
  Description of Artificial Sequence: Synthetic oligonucleotide
  Description of Combined DNA/RNA Molecule: Synthetic oligonucleotide
tuccagcuuuauugggaggctu

SEQ ID NO: 1564 - DNA, 22 bp, Artificial Sequence
  Description of Artificial Sequence: Synthetic oligonucleotide
  Description of Combined DNA/RNA Molecule: Synthetic oligonucleotide
tgccagcuuuauugggaggctu

SEQ ID NO: 1565 - DNA, 22 bp, Artificial Sequence
  Description of Artificial Sequence: Synthetic oligonucleotide
  Description of Combined DNA/RNA Molecule: Synthetic oligonucleotide
tgucagcuuuauugggaggctu

SEQ ID NO: 1566 - DNA, 22 bp, Artificial Sequence
  Description of Artificial Sequence: Synthetic oligonucleotide
  Description of Combined DNA/RNA Molecule: Synthetic oligonucleotide
tgucagcuuuauugggaggctu

SEQ ID NO: 1567 - DNA, 22 bp, Artificial Sequence
  Description of Artificial Sequence: Synthetic oligonucleotide
  Description of Combined DNA/RNA Molecule: Synthetic oligonucleotide
tguccgcuuuauugggaggctu

SEQ ID NO: 1568 - DNA, 22 bp, Artificial Sequence
  Description of Artificial Sequence: Synthetic oligonucleotide
  Description of Combined DNA/RNA Molecule: Synthetic oligonucleotide
tguccacuuuauugggaggctu

SEQ ID NO: 1569 - DNA, 22 bp, Artificial Sequence
  Description of Artificial Sequence: Synthetic oligonucleotide
  Description of Combined DNA/RNA Molecule: Synthetic oligonucleotide
tguccaguuuauugggaggctu

SEQ ID NO: 1570 - DNA, 22 bp, Artificial Sequence
  Description of Artificial Sequence: Synthetic oligonucleotide
  Description of Combined DNA/RNA Molecule: Synthetic oligonucleotide
tguccagcuuauugggaggctu

SEQ ID NO: 1571 - DNA, 22 bp, Artificial Sequence
  Description of Artificial Sequence: Synthetic oligonucleotide
  Description of Combined DNA/RNA Molecule: Synthetic oligonucleotide
tguccagcuuauugggaggctu

SEQ ID NO: 1572 - DNA, 22 bp, Artificial Sequence
  Description of Artificial Sequence: Synthetic oligonucleotide
  Description of Combined DNA/RNA Molecule: Synthetic oligonucleotide
tguccagcuuauugggaggctu

SEQ ID NO: 1573 - DNA, 22 bp, Artificial Sequence
  Description of Artificial Sequence: Synthetic oligonucleotide
  Description of Combined DNA/RNA Molecule: Synthetic oligonucleotide
gccacuguagaaaggcaugatu

SEQ ID NO: 1574 - DNA, 22 bp, Artificial Sequence
  Description of Artificial Sequence: Synthetic oligonucleotide
  Description of Combined DNA/RNA Molecule: Synthetic oligonucleotide
tccacuguagaaaggcaugatu

SEQ ID NO: 1575 - DNA, 22 bp, Artificial Sequence
  Description of Artificial Sequence: Synthetic oligonucleotide
  Description of Combined DNA/RNA Molecule: Synthetic oligonucleotide
tgcacuguagaaaggcaugatu

SEQ ID NO: 1576 - DNA, 22 bp, Artificial Sequence
  Description of Artificial Sequence: Synthetic oligonucleotide
  Description of Combined DNA/RNA Molecule: Synthetic oligonucleotide
tgcacuguagaaaggcaugatu

SEQ ID NO: 1577 - DNA, 22 bp, Artificial Sequence
  Description of Artificial Sequence: Synthetic oligonucleotide
  Description of Combined DNA/RNA Molecule: Synthetic oligonucleotide
tgcccuguagaaaggcaugatu

SEQ ID NO: 1578 - DNA, 22 bp, Artificial Sequence
  Description of Artificial Sequence: Synthetic oligonucleotide
  Description of Combined DNA/RNA Molecule: Synthetic oligonucleotide
tgccauguagaaaggcaugatu

SEQ ID NO: 1579 - DNA, 22 bp, Artificial Sequence
  Description of Artificial Sequence: Synthetic oligonucleotide
  Description of Combined DNA/RNA Molecule: Synthetic oligonucleotide
tgccacguagaaaggcaugatu

SEQ ID NO: 1580 - DNA, 22 bp, Artificial Sequence
  Description of Artificial Sequence: Synthetic oligonucleotide
  Description of Combined DNA/RNA Molecule: Synthetic oligonucleotide
tgccacuuagaaaggcaugatu

SEQ ID NO: 1581 - DNA, 22 bp, Artificial Sequence
  Description of Artificial Sequence: Synthetic oligonucleotide
  Description of Combined DNA/RNA Molecule: Synthetic oligonucleotide
tgccacugagaaaggcaugatu

SEQ ID NO: 1582 - DNA, 22 bp, Artificial Sequence
  Description of Artificial Sequence: Synthetic oligonucleotide
  Description of Combined DNA/RNA Molecule: Synthetic oligonucleotide
tgccacugugaaaggcaugatu

SEQ ID NO: 1583 - DNA, 22 bp, Artificial Sequence
  Description of Artificial Sequence: Synthetic oligonucleotide
  Description of Combined DNA/RNA Molecule: Synthetic oligonucleotide
tgccacuguaaaaggcaugatu

SEQ ID NO: 1584 - DNA, 22 bp, Artificial Sequence
  Description of Artificial Sequence: Synthetic oligonucleotide
  Description of Combined DNA/RNA Molecule: Synthetic oligonucleotide
tgccacuguagaaggcaugatu

SEQ ID NO: 1585 - DNA, 22 bp, Artificial Sequence
  Description of Artificial Sequence: Synthetic oligonucleotide
  Description of Combined DNA/RNA Molecule: Synthetic oligonucleotide
gccacuguagaaaggcaugatu

SEQ ID NO: 1586 - DNA, 22 bp, Artificial Sequence
  Description of Artificial Sequence: Synthetic oligonucleotide
  Description of Combined DNA/RNA Molecule: Synthetic oligonucleotide
tccacuguagaaaggcaugatu

SEQ ID NO: 1587 - DNA, 22 bp, Artificial Sequence
  Description of Artificial Sequence: Synthetic oligonucleotide
  Description of Combined DNA/RNA Molecule: Synthetic oligonucleotide
tgcacuguagaaaggcaugatu

SEQ ID NO: 1588 - DNA, 22 bp, Artificial Sequence
  Description of Artificial Sequence: Synthetic oligonucleotide
  Description of Combined DNA/RNA Molecule: Synthetic oligonucleotide
tgcacuguagaaaggcaugatu

SEQ ID NO: 1589 - DNA, 22 bp, Artificial Sequence
  Description of Artificial Sequence: Synthetic oligonucleotide
  Description of Combined DNA/RNA Molecule: Synthetic oligonucleotide
tgcccuguagaaaggcaugatu

SEQ ID NO: 1590 - DNA, 22 bp, Artificial Sequence
  Description of Artificial Sequence: Synthetic oligonucleotide
  Description of Combined DNA/RNA Molecule: Synthetic oligonucleotide
tgccauguagaaaggcaugatu

SEQ ID NO: 1591 - DNA, 22 bp, Artificial Sequence
  Description of Artificial Sequence: Synthetic oligonucleotide
  Description of Combined DNA/RNA Molecule: Synthetic oligonucleotide
tgccacguagaaaggcaugatu

SEQ ID NO: 1592 - DNA, 22 bp, Artificial Sequence
  Description of Artificial Sequence: Synthetic oligonucleotide
  Description of Combined DNA/RNA Molecule: Synthetic oligonucleotide
tgccacuuagaaaggcaugatu

SEQ ID NO: 1593 - DNA, 22 bp, Artificial Sequence
  Description of Artificial Sequence: Synthetic oligonucleotide
  Description of Combined DNA/RNA Molecule: Synthetic oligonucleotide
tgccacugagaaaggcaugatu

SEQ ID NO: 1594 - DNA, 22 bp, Artificial Sequence
  Description of Artificial Sequence: Synthetic oligonucleotide
  Description of Combined DNA/RNA Molecule: Synthetic oligonucleotide
tgccacugugaaaggcaugatu

SEQ ID NO: 1595 - DNA, 22 bp, Artificial Sequence
  Description of Artificial Sequence: Synthetic oligonucleotide
  Description of Combined DNA/RNA Molecule: Synthetic oligonucleotide
tgccacuguaaaaggcaugatu

SEQ ID NO: 1596 - DNA, 22 bp, Artificial Sequence
  Description of Artificial Sequence: Synthetic oligonucleotide
  Description of Combined DNA/RNA Molecule: Synthetic oligonucleotide
tgccacuguagaaggcaugatu

SEQ ID NO: 1597 - DNA, 23 bp, Artificial Sequence
  Description of Artificial Sequence: Synthetic oligonucleotide
  Description of Combined DNA/RNA Molecule: Synthetic oligonucleotide
tguccagcuuuauugggaggctu

SEQ ID NO: 1598 - DNA, 23 bp, Artificial Sequence
  Description of Artificial Sequence: Synthetic oligonucleotide
  Description of Combined DNA/RNA Molecule: Synthetic oligonucleotide
tguccagcuuuauugggaggctu

SEQ ID NO: 1599 - DNA, 23 bp, Artificial Sequence
  Description of Artificial Sequence: Synthetic oligonucleotide
  Description of Combined DNA/RNA Molecule: Synthetic oligonucleotide
tagcuucuuguccagcuuuautu

SEQ ID NO: 1600 - DNA, 23 bp, Artificial Sequence
  Description of Artificial Sequence: Synthetic oligonucleotide
  Description of Combined DNA/RNA Molecule: Synthetic oligonucleotide
tagcuucuuguccagcuuuautu

SEQ ID NO: 1601 - DNA, 23 bp, Artificial Sequence
  Description of Artificial Sequence: Synthetic oligonucleotide
  Description of Combined DNA/RNA Molecule: Synthetic oligonucleotide
tagcuucuuguccagcuuuautu

SEQ ID NO: 1602 - DNA, 23 bp, Artificial Sequence
  Description of Artificial Sequence: Synthetic oligonucleotide
  Description of Combined DNA/RNA Molecule: Synthetic oligonucleotide
tagcuucuuguccagcuuuautu

SEQ ID NO: 1603 - DNA, 23 bp, Artificial Sequence
  Description of Artificial Sequence: Synthetic oligonucleotide
  Description of Combined DNA/RNA Molecule: Synthetic oligonucleotide
tagcuucuuguccagcuuuautu

SEQ ID NO: 1604 - DNA, 23 bp, Artificial Sequence
  Description of Artificial Sequence: Synthetic oligonucleotide
  Description of Combined DNA/RNA Molecule: Synthetic oligonucleotide
tagcuucuuguccagcuuuautu

SEQ ID NO: 1605 - DNA, 23 bp, Artificial Sequence
  Description of Artificial Sequence: Synthetic oligonucleotide
  Description of Combined DNA/RNA Molecule: Synthetic oligonucleotide
tagcuucuuguccagcuuuautu

SEQ ID NO: 1606 - DNA, 23 bp, Artificial Sequence
  Description of Artificial Sequence: Synthetic oligonucleotide
  Description of Combined DNA/RNA Molecule: Synthetic oligonucleotide
tagcuucuuguccagcuuuautu

SEQ ID NO: 1607 - DNA, 23 bp, Artificial Sequence
  Description of Artificial Sequence: Synthetic oligonucleotide
  Description of Combined DNA/RNA Molecule: Synthetic oligonucleotide
tagcuucuuguccagcuuuautu

SEQ ID NO: 1608 - DNA, 23 bp, Artificial Sequence
  Description of Artificial Sequence: Synthetic oligonucleotide
  Description of Combined DNA/RNA Molecule: Synthetic oligonucleotide
tagcuucuuguccagcuuuautu

SEQ ID NO: 1609 - DNA, 23 bp, Artificial Sequence
  Description of Artificial Sequence: Synthetic oligonucleotide
  Description of Combined DNA/RNA Molecule: Synthetic oligonucleotide
tagcuucuuguccagcuuuautu

SEQ ID NO: 1610 - DNA, 23 bp, Artificial Sequence
  Description of Artificial Sequence: Synthetic oligonucleotide
  Description of Combined DNA/RNA Molecule: Synthetic oligonucleotide
tagcuucuuguccagcuuuautu

SEQ ID NO: 1611 - DNA, 23 bp, Artificial Sequence
  Description of Artificial Sequence: Synthetic oligonucleotide
  Description of Combined DNA/RNA Molecule: Synthetic oligonucleotide
tagcuucuuguccagcuuuautu

SEQ ID NO: 1612 - DNA, 23 bp, Artificial Sequence
  Description of Artificial Sequence: Synthetic oligonucleotide
  Description of Combined DNA/RNA Molecule: Synthetic oligonucleotide
tagcuucuuguccagcuuuautu

SEQ ID NO: 1613 - DNA, 23 bp, Artificial Sequence
  Description of Artificial Sequence: Synthetic oligonucleotide
  Description of Combined DNA/RNA Molecule: Synthetic oligonucleotide
tguccagcuuuauugggaggctu

SEQ ID NO: 1614 - DNA, 23 bp, Artificial Sequence
  Description of Artificial Sequence: Synthetic oligonucleotide
  Description of Combined DNA/RNA Molecule: Synthetic oligonucleotide
tguccagcuuuauugggaggctu

SEQ ID NO: 1615 - DNA, 23 bp, Artificial Sequence
  Description of Artificial Sequence: Synthetic oligonucleotide
  Description of Combined DNA/RNA Molecule: Synthetic oligonucleotide
tagcuucuuguccagcuuuautu

SEQ ID NO: 1616 - DNA, 23 bp, Artificial Sequence
  Description of Artificial Sequence: Synthetic oligonucleotide
  Description of Combined DNA/RNA Molecule: Synthetic oligonucleotide
tagcuucuuguccagcuuuautu

SEQ ID NO: 1617 - DNA, 23 bp, Artificial Sequence
  Description of Artificial Sequence: Synthetic oligonucleotide
  Description of Combined DNA/RNA Molecule: Synthetic oligonucleotide
tguccagcuuuauugggaggctu

SEQ ID NO: 1618 - DNA, 23 bp, Artificial Sequence
  Description of Artificial Sequence: Synthetic oligonucleotide
  Description of Combined DNA/RNA Molecule: Synthetic oligonucleotide
tguccagcuuuauugggaggctu

SEQ ID NO: 1619 - DNA, 23 bp, Artificial Sequence
  Description of Artificial Sequence: Synthetic oligonucleotide
  Description of Combined DNA/RNA Molecule: Synthetic oligonucleotide
tguccagcuuuauugggaggctu

SEQ ID NO: 1620 - DNA, 23 bp, Artificial Sequence
  Description of Artificial Sequence: Synthetic oligonucleotide
  Description of Combined DNA/RNA Molecule: Synthetic oligonucleotide
tguccagcuuuauugggaggctu

SEQ ID NO: 1621 - DNA, 23 bp, Artificial Sequence
  Description of Artificial Sequence: Synthetic oligonucleotide
  Description of Combined DNA/RNA Molecule: Synthetic oligonucleotide
tguccagcuuuauugggaggctu

SEQ ID NO: 1622 - DNA, 23 bp, Artificial Sequence
  Description of Artificial Sequence: Synthetic oligonucleotide
  Description of Combined DNA/RNA Molecule: Synthetic oligonucleotide
tguccagcuuuauugggaggctu

SEQ ID NO: 1623 - DNA, 23 bp, Artificial Sequence
  Description of Artificial Sequence: Synthetic oligonucleotide
  Description of Combined DNA/RNA Molecule: Synthetic oligonucleotide
tguccagcuuuauugggaggctu

SEQ ID NO: 1624 - DNA, 23 bp, Artificial Sequence
  Description of Artificial Sequence: Synthetic oligonucleotide
  Description of Combined DNA/RNA Molecule: Synthetic oligonucleotide
tguccagcuuuauugggaggctu

SEQ ID NO: 1625 - DNA, 23 bp, Artificial Sequence
  Description of Artificial Sequence: Synthetic oligonucleotide
  Description of Combined DNA/RNA Molecule: Synthetic oligonucleotide
tguccagcuuuauugggaggctu

SEQ ID NO: 1626 - DNA, 20 bp, Artificial Sequence
  Description of Artificial Sequence: Synthetic oligonucleotide
  Description of Combined DNA/RNA Molecule: Synthetic oligonucleotide
agctucttgtccagcuuuau

SEQ ID NO: 1627 - DNA, 20 bp, Artificial Sequence
  Description of Artificial Sequence: Synthetic oligonucleotide
  Description of Combined DNA/RNA Molecule: Synthetic oligonucleotide
agctucttgtccagcuuuau

SEQ ID NO: 1628 - DNA, 20 bp, Artificial Sequence
  Description of Artificial Sequence: Synthetic oligonucleotide
  Description of Combined DNA/RNA Molecule: Synthetic oligonucleotide
agctucttgtccagcuuuau

SEQ ID NO: 1629 - DNA, 20 bp, Artificial Sequence
  Description of Artificial Sequence: Synthetic oligonucleotide
  Description of Combined DNA/RNA Molecule: Synthetic oligonucleotide
agctucttgtccagcuuuau

SEQ ID NO: 1630 - DNA, 20 bp, Artificial Sequence
  Description of Artificial Sequence: Synthetic oligonucleotide
  Description of Combined DNA/RNA Molecule: Synthetic oligonucleotide
agctucttgtccagcuuuau

SEQ ID NO: 1631 - DNA, 20 bp, Artificial Sequence
  Description of Artificial Sequence: Synthetic oligonucleotide
  Description of Combined DNA/RNA Molecule: Synthetic oligonucleotide
agctucttgtccagcuuuau

SEQ ID NO: 1632 - DNA, 20 bp, Artificial Sequence
  Description of Artificial Sequence: Synthetic oligonucleotide
  Description of Combined DNA/RNA Molecule: Synthetic oligonucleotide
agctucttgtccagcuuuau

SEQ ID NO: 1633 - DNA, 20 bp, Artificial Sequence
  Description of Artificial Sequence: Synthetic oligonucleotide
  Description of Combined DNA/RNA Molecule: Synthetic oligonucleotide
agctucttgtccagcuuuau

SEQ ID NO: 1634 - DNA, 20 bp, Artificial Sequence
  Description of Artificial Sequence: Synthetic oligonucleotide
agcttcttgtccagctttat

SEQ ID NO: 1635 - DNA, 20 bp, Artificial Sequence
  Description of Artificial Sequence: Synthetic oligonucleotide
agcttcttgtccagctttat

SEQ ID NO: 1636 - DNA, 20 bp, Artificial Sequence
  Description of Artificial Sequence: Synthetic oligonucleotide
agcttcttgtccagctttat

SEQ ID NO: 1637 - DNA, 20 bp, Artificial Sequence
  Description of Artificial Sequence: Synthetic oligonucleotide
agcttcttgtccagctttat

SEQ ID NO: 1638 - DNA, 20 bp, Artificial Sequence
  Description of Artificial Sequence: Synthetic oligonucleotide
agcttcttgtccagctttat

SEQ ID NO: 1639 - DNA, 23 bp, Artificial Sequence
  Description of Artificial Sequence: Synthetic oligonucleotide
  Description of Combined DNA/RNA Molecule: Synthetic oligonucleotide
tagcuucuuguccagcuuuautu

SEQ ID NO: 1640 - DNA, 23 bp, Artificial Sequence
  Description of Artificial Sequence: Synthetic oligonucleotide
  Description of Combined DNA/RNA Molecule: Synthetic oligonucleotide
tagcuucuuguccagcuuuautu

SEQ ID NO: 1641 - DNA, 23 bp, Artificial Sequence
  Description of Artificial Sequence: Synthetic oligonucleotide
  Description of Combined DNA/RNA Molecule: Synthetic oligonucleotide
tagcuucuuguccagcuuuautu

SEQ ID NO: 1642 - DNA, 23 bp, Artificial Sequence
  Description of Artificial Sequence: Synthetic oligonucleotide
  Description of Combined DNA/RNA Molecule: Synthetic oligonucleotide
tagcuucuuguccagcuuuautu

SEQ ID NO: 1643 - DNA, 23 bp, Artificial Sequence
  Description of Artificial Sequence: Synthetic oligonucleotide
  Description of Combined DNA/RNA Molecule: Synthetic oligonucleotide
tguccagcuuuauugggaggctu

SEQ ID NO: 1644 - DNA, 23 bp, Artificial Sequence
  Description of Artificial Sequence: Synthetic oligonucleotide
  Description of Combined DNA/RNA Molecule: Synthetic oligonucleotide
tagcuucuuguccagcuuuautu

SEQ ID NO: 1645 - DNA, 23 bp, Artificial Sequence
  Description of Artificial Sequence: Synthetic oligonucleotide
  Description of Combined DNA/RNA Molecule: Synthetic oligonucleotide
tagcuucuuguccagcuuuautu

SEQ ID NO: 1646 - DNA, 23 bp, Artificial Sequence
  Description of Artificial Sequence: Synthetic oligonucleotide
  Description of Combined DNA/RNA Molecule: Synthetic oligonucleotide
tagcuucuuguccagcuuuautu

SEQ ID NO: 1647 - DNA, 23 bp, Artificial Sequence
  Description of Artificial Sequence: Synthetic oligonucleotide
  Description of Combined DNA/RNA Molecule: Synthetic oligonucleotide
tagcuucuuguccagcuuuautu

SEQ ID NO: 1648 - DNA, 23 bp, Artificial Sequence
  Description of Artificial Sequence: Synthetic oligonucleotide
  Description of Combined DNA/RNA Molecule: Synthetic oligonucleotide
tguccagcuuuauugggaggctu

SEQ ID NO: 1649 - DNA, 23 bp, Artificial Sequence
  Description of Artificial Sequence: Synthetic oligonucleotide
  Description of Combined DNA/RNA Molecule: Synthetic oligonucleotide
tgccacuguagaaaggcaugatu

SEQ ID NO: 1650 - DNA, 23 bp, Artificial Sequence
  Description of Artificial Sequence: Synthetic oligonucleotide
  Description of Combined DNA/RNA Molecule: Synthetic oligonucleotide
tgccacuguagaaaggcaugatu

SEQ ID NO: 1651 - DNA, 23 bp, Artificial Sequence
  Description of Artificial Sequence: Synthetic oligonucleotide
  Description of Combined DNA/RNA Molecule: Synthetic oligonucleotide
tgccacuguagaaaggcaugatu

SEQ ID NO: 1652 - DNA, 23 bp, Artificial Sequence
  Description of Artificial Sequence: Synthetic oligonucleotide
  Description of Combined DNA/RNA Molecule: Synthetic oligonucleotide
tgccacuguagaaaggcaugatu

SEQ ID NO: 1653 - DNA, 20 bp, Artificial Sequence
  Description of Artificial Sequence: Synthetic oligonucleotide
  Description of Combined DNA/RNA Molecule: Synthetic oligonucleotide
agctucttgtccagcuuuau

SEQ ID NO: 1654 - DNA, 20 bp, Artificial Sequence
  Description of Artificial Sequence: Synthetic oligonucleotide
  Description of Combined DNA/RNA Molecule: Synthetic oligonucleotide
agctucttgtccagcuuuau

SEQ ID NO: 1655 - DNA, 20 bp, Artificial Sequence
  Description of Artificial Sequence: Synthetic oligonucleotide
  Description of Combined DNA/RNA Molecule: Synthetic oligonucleotide
agctucttgtccagcuuuau

SEQ ID NO: 1656 - DNA, 20 bp, Artificial Sequence
  Description of Artificial Sequence: Synthetic oligonucleotide
  Description of Combined DNA/RNA Molecule: Synthetic oligonucleotide
agctucttgtccagcuuuau

SEQ ID NO: 1657 - DNA, 23 bp, Artificial Sequence
  Description of Artificial Sequence: Synthetic oligonucleotide
  Description of Combined DNA/RNA Molecule: Synthetic oligonucleotide
tcacugagaauacugucccuutu

SEQ ID NO: 1658 - DNA, 23 bp, Artificial Sequence
  Description of Artificial Sequence: Synthetic oligonucleotide
  Description of Combined DNA/RNA Molecule: Synthetic oligonucleotide
tcacugagaauacugucccuutu

SEQ ID NO: 1659 - DNA, 23 bp, Artificial Sequence
  Description of Artificial Sequence: Synthetic oligonucleotide
  Description of Combined DNA/RNA Molecule: Synthetic oligonucleotide
tcacugagaauacugucccuutu

SEQ ID NO: 1660 - DNA, 23 bp, Artificial Sequence
  Description of Artificial Sequence: Synthetic oligonucleotide
  Description of Combined DNA/RNA Molecule: Synthetic oligonucleotide
tcacugagaauacugucccuutu

SEQ ID NO: 1661 - DNA, 23 bp, Artificial Sequence
  Description of Artificial Sequence: Synthetic oligonucleotide
  Description of Combined DNA/RNA Molecule: Synthetic oligonucleotide
tcacugagaauacugucccuutu

SEQ ID NO: 1662 - DNA, 23 bp, Artificial Sequence
  Description of Artificial Sequence: Synthetic oligonucleotide
  Description of Combined DNA/RNA Molecule: Synthetic oligonucleotide
tcacugagaauacugucccuutu

SEQ ID NO: 1663 - DNA, 23 bp, Artificial Sequence
  Description of Artificial Sequence: Synthetic oligonucleotide
  Description of Combined DNA/RNA Molecule: Synthetic oligonucleotide
tcacugagaauacugucccuutu

SEQ ID NO: 1664 - DNA, 23 bp, Artificial Sequence
  Description of Artificial Sequence: Synthetic oligonucleotide
  Description of Combined DNA/RNA Molecule: Synthetic oligonucleotide
tcacugagaauacugucccuutu

SEQ ID NO: 1665 - DNA, 23 bp, Artificial Sequence
  Description of Artificial Sequence: Synthetic oligonucleotide
  Description of Combined DNA/RNA Molecule: Synthetic oligonucleotide
tcacugagaauacugucccuutu

SEQ ID NO: 1666 - DNA, 23 bp, Artificial Sequence
  Description of Artificial Sequence: Synthetic oligonucleotide
  Description of Combined DNA/RNA Molecule: Synthetic oligonucleotide
tcacugagaauacugucccuutu

SEQ ID NO: 1667 - DNA, 23 bp, Artificial Sequence
  Description of Artificial Sequence: Synthetic oligonucleotide
  Description of Combined DNA/RNA Molecule: Synthetic oligonucleotide
tcacugagaauacugucccuutu

SEQ ID NO: 1668 - DNA, 23 bp, Artificial Sequence
  Description of Artificial Sequence: Synthetic oligonucleotide
  Description of Combined DNA/RNA Molecule: Synthetic oligonucleotide
tcacugagaauacugucccuutu

SEQ ID NO: 1669 - DNA, 23 bp, Artificial Sequence
  Description of Artificial Sequence: Synthetic oligonucleotide
  Description of Combined DNA/RNA Molecule: Synthetic oligonucleotide
tcacugagaauacugucccuutu

SEQ ID NO: 1670 - DNA, 23 bp, Artificial Sequence
  Description of Artificial Sequence: Synthetic oligonucleotide
  Description of Combined DNA/RNA Molecule: Synthetic oligonucleotide
tcacugagaauacugucccuutu

SEQ ID NO: 1671 - DNA, 23 bp, Artificial Sequence
  Description of Artificial Sequence: Synthetic oligonucleotide
  Description of Combined DNA/RNA Molecule: Synthetic oligonucleotide
tcacugagaauacugucccuutu

SEQ ID NO: 1672 - DNA, 23 bp, Artificial Sequence
  Description of Artificial Sequence: Synthetic oligonucleotide
  Description of Combined DNA/RNA Molecule: Synthetic oligonucleotide
tcacugagaauacugucccuutu

SEQ ID NO: 1673 - DNA, 23 bp, Artificial Sequence
  Description of Artificial Sequence: Synthetic oligonucleotide
  Description of Combined DNA/RNA Molecule: Synthetic oligonucleotide
tcacugagaauacugucccuutu

SEQ ID NO: 1674 - DNA, 23 bp, Artificial Sequence
  Description of Artificial Sequence: Synthetic oligonucleotide
  Description of Combined DNA/RNA Molecule: Synthetic oligonucleotide
tcacugagaauacugucccuutu

SEQ ID NO: 1675 - DNA, 23 bp, Artificial Sequence
  Description of Artificial Sequence: Synthetic oligonucleotide
  Description of Combined DNA/RNA Molecule: Synthetic oligonucleotide
tcacugagaauacugucccuutu

SEQ ID NO: 1676 - DNA, 23 bp, Artificial Sequence
  Description of Artificial Sequence: Synthetic oligonucleotide
  Description of Combined DNA/RNA Molecule: Synthetic oligonucleotide
tcacugagaauacugucccuutu

SEQ ID NO: 1677 - DNA, 23 bp, Artificial Sequence
  Description of Artificial Sequence: Synthetic oligonucleotide
  Description of Combined DNA/RNA Molecule: Synthetic oligonucleotide
tguccagcuuuauugggaggctu

SEQ ID NO: 1678 - DNA, 23 bp, Artificial Sequence
  Description of Artificial Sequence: Synthetic oligonucleotide
  Description of Combined DNA/RNA Molecule: Synthetic oligonucleotide
tguccagcuuuauugggaggctu

SEQ ID NO: 1679 - DNA, 23 bp, Artificial Sequence
  Description of Artificial Sequence: Synthetic oligonucleotide
  Description of Combined DNA/RNA Molecule: Synthetic oligonucleotide
tagcuucuuguccagcuuuautu

SEQ ID NO: 1680 - DNA, 20 bp, Artificial Sequence
  Description of Artificial Sequence: Synthetic oligonucleotide
  Description of Combined DNA/RNA Molecule: Synthetic oligonucleotide
agcttcttgtccagcuuuau

SEQ ID NO: 1681 - DNA, 20 bp, Artificial Sequence
  Description of Artificial Sequence: Synthetic oligonucleotide
  Description of Combined DNA/RNA Molecule: Synthetic oligonucleotide
agcttcttgtccagcuuuau

SEQ ID NO: 1682 - DNA, 20 bp, Artificial Sequence
  Description of Artificial Sequence: Synthetic oligonucleotide
  Description of Combined DNA/RNA Molecule: Synthetic oligonucleotide
agcttcttgtccagctuuau

SEQ ID NO: 1683 - DNA, 20 bp, Artificial Sequence
  Description of Artificial Sequence: Synthetic oligonucleotide
  Description of Combined DNA/RNA Molecule: Synthetic oligonucleotide
agcttcttgtccagctuuau

SEQ ID NO: 1684 - DNA, 23 bp, Artificial Sequence
  Description of Artificial Sequence: Synthetic oligonucleotide
  Description of Combined DNA/RNA Molecule: Synthetic oligonucleotide
tguccagcuuuauugggaggctu

SEQ ID NO: 1685 - DNA, 23 bp, Artificial Sequence
  Description of Artificial Sequence: Synthetic oligonucleotide
  Description of Combined DNA/RNA Molecule: Synthetic oligonucleotide
tguccagcuuuauugggaggctu

SEQ ID NO: 1686 - DNA, 23 bp, Artificial Sequence
  Description of Artificial Sequence: Synthetic oligonucleotide
  Description of Combined DNA/RNA Molecule: Synthetic oligonucleotide
tagcuucuuguccagcuuuautu

SEQ ID NO: 1687 - DNA, 20 bp, Artificial Sequence
  Description of Artificial Sequence: Synthetic oligonucleotide
  Description of Combined DNA/RNA Molecule: Synthetic oligonucleotide
agcttcttgtccagcuuuau

SEQ ID NO: 1688 - DNA, 20 bp, Artificial Sequence
  Description of Artificial Sequence: Synthetic oligonucleotide
  Description of Combined DNA/RNA Molecule: Synthetic oligonucleotide
agcttcttgtccagcuuuau

SEQ ID NO: 1689 - DNA, 20 bp, Artificial Sequence
  Description of Artificial Sequence: Synthetic oligonucleotide
  Description of Combined DNA/RNA Molecule: Synthetic oligonucleotide
agcttcttgtccagctuuau

SEQ ID NO: 1690 - DNA, 20 bp, Artificial Sequence
  Description of Artificial Sequence: Synthetic oligonucleotide
  Description of Combined DNA/RNA Molecule: Synthetic oligonucleotide
agcttcttgtccagctuuau

SEQ ID NO: 1691 - DNA, 20 bp, Artificial Sequence
  Description of Artificial Sequence: Synthetic oligonucleotide
  Description of Combined DNA/RNA Molecule: Synthetic oligonucleotide
agcttcttgtccagcuuuau

SEQ ID NO: 1692 - DNA, 20 bp, Artificial Sequence
  Description of Artificial Sequence: Synthetic oligonucleotide
  Description of Combined DNA/RNA Molecule: Synthetic oligonucleotide
agcttcttgtccagcuuuau

SEQ ID NO: 1693 - DNA, 20 bp, Artificial Sequence
  Description of Artificial Sequence: Synthetic oligonucleotide
  Description of Combined DNA/RNA Molecule: Synthetic oligonucleotide
agcttcttgtccagctuuau

SEQ ID NO: 1694 - DNA, 20 bp, Artificial Sequence
  Description of Artificial Sequence: Synthetic oligonucleotide
  Description of Combined DNA/RNA Molecule: Synthetic oligonucleotide
agcttcttgtccagctuuau

SEQ ID NO: 1695 - DNA, 23 bp, Artificial Sequence
  Description of Artificial Sequence: Synthetic oligonucleotide
  Description of Combined DNA/RNA Molecule: Synthetic oligonucleotide
tguccagcuuuauugggaggctu

SEQ ID NO: 1696 - DNA, 23 bp, Artificial Sequence
  Description of Artificial Sequence: Synthetic oligonucleotide
  Description of Combined DNA/RNA Molecule: Synthetic oligonucleotide
tguccagcuuuauugggaggctu

SEQ ID NO: 1697 - DNA, 23 bp, Artificial Sequence
  Description of Artificial Sequence: Synthetic oligonucleotide
  Description of Combined DNA/RNA Molecule: Synthetic oligonucleotide
tagcuucuuguccagcuuuautu

SEQ ID NO: 1698 - DNA, 23 bp, Artificial Sequence
  Description of Artificial Sequence: Synthetic oligonucleotide
  Description of Combined DNA/RNA Molecule: Synthetic oligonucleotide
tagcuucuuguccagcuuuautu

SEQ ID NO: 1699 - DNA, 23 bp, Artificial Sequence
  Description of Artificial Sequence: Synthetic oligonucleotide
  Description of Combined DNA/RNA Molecule: Synthetic oligonucleotide
tccuucccugaagguuccucctu

SEQ ID NO: 1700 - DNA, 23 bp, Artificial Sequence
  Description of Artificial Sequence: Synthetic oligonucleotide
  Description of Combined DNA/RNA Molecule: Synthetic oligonucleotide
tccuucccugaagguuccucctu

SEQ ID NO: 1701 - DNA, 23 bp, Artificial Sequence
  Description of Artificial Sequence: Synthetic oligonucleotide
  Description of Combined DNA/RNA Molecule: Synthetic oligonucleotide
tccuucccugaagguuccucctu

SEQ ID NO: 1702 - DNA, 23 bp, Artificial Sequence
  Description of Artificial Sequence: Synthetic oligonucleotide
  Description of Combined DNA/RNA Molecule: Synthetic oligonucleotide
tccuucccugaagguuccucctu

SEQ ID NO: 1703 - DNA, 23 bp, Artificial Sequence
  Description of Artificial Sequence: Synthetic oligonucleotide
  Description of Combined DNA/RNA Molecule: Synthetic oligonucleotide
tccuucccugaagguuccucctu

SEQ ID NO: 1704 - DNA, 23 bp, Artificial Sequence
  Description of Artificial Sequence: Synthetic oligonucleotide
  Description of Combined DNA/RNA Molecule: Synthetic oligonucleotide
tccuucccugaagguuccucctu

SEQ ID NO: 1705 - DNA, 23 bp, Artificial Sequence
  Description of Artificial Sequence: Synthetic oligonucleotide
  Description of Combined DNA/RNA Molecule: Synthetic oligonucleotide
tccuucccugaagguuccucctu

SEQ ID NO: 1706 - DNA, 23 bp, Artificial Sequence
  Description of Artificial Sequence: Synthetic oligonucleotide
  Description of Combined DNA/RNA Molecule: Synthetic oligonucleotide
tccuucccugaagguuccucctu

SEQ ID NO: 1707 - DNA, 23 bp, Artificial Sequence
  Description of Artificial Sequence: Synthetic oligonucleotide
  Description of Combined DNA/RNA Molecule: Synthetic oligonucleotide
tcacugagaauacugucccuutu

SEQ ID NO: 1708 - DNA, 23 bp, Artificial Sequence
  Description of Artificial Sequence: Synthetic oligonucleotide
  Description of Combined DNA/RNA Molecule: Synthetic oligonucleotide
tcacugagaauacugucccuutu

SEQ ID NO: 1709 - DNA, 23 bp, Artificial Sequence
  Description of Artificial Sequence: Synthetic oligonucleotide
  Description of Combined DNA/RNA Molecule: Synthetic oligonucleotide
tcacugagaauacugucccuutu

SEQ ID NO: 1710 - DNA, 23 bp, Artificial Sequence
  Description of Artificial Sequence: Synthetic oligonucleotide
  Description of Combined DNA/RNA Molecule: Synthetic oligonucleotide
tcacugagaauacugucccuutu

SEQ ID NO: 1711 - DNA, 23 bp, Artificial Sequence
  Description of Artificial Sequence: Synthetic oligonucleotide
  Description of Combined DNA/RNA Molecule: Synthetic oligonucleotide
tcacugagaauacugucccuutu

SEQ ID NO: 1712 - DNA, 23 bp, Artificial Sequence
  Description of Artificial Sequence: Synthetic oligonucleotide
  Description of Combined DNA/RNA Molecule: Synthetic oligonucleotide
tcacugagaauacugucccuutu

SEQ ID NO: 1713 - DNA, 23 bp, Artificial Sequence
  Description of Artificial Sequence: Synthetic oligonucleotide
  Description of Combined DNA/RNA Molecule: Synthetic oligonucleotide
tcacugagaauacugucccuutu

SEQ ID NO: 1714 - DNA, 23 bp, Artificial Sequence
  Description of Artificial Sequence: Synthetic oligonucleotide
  Description of Combined DNA/RNA Molecule: Synthetic oligonucleotide
tcacugagaauacugucccuutu

SEQ ID NO: 1715 - DNA, 23 bp, Artificial Sequence
  Description of Artificial Sequence: Synthetic oligonucleotide
  Description of Combined DNA/RNA Molecule: Synthetic oligonucleotide
tcacugagaauacugucccuutu

SEQ ID NO: 1716 - DNA, 23 bp, Artificial Sequence
  Description of Artificial Sequence: Synthetic oligonucleotide
  Description of Combined DNA/RNA Molecule: Synthetic oligonucleotide
tcacugagaauacugucccuutu

SEQ ID NO: 1717 - DNA, 23 bp, Artificial Sequence
  Description of Artificial Sequence: Synthetic oligonucleotide
  Description of Combined DNA/RNA Molecule: Synthetic oligonucleotide
tcacugagaauacugucccuutu

SEQ ID NO: 1718 - DNA, 23 bp, Artificial Sequence
  Description of Artificial Sequence: Synthetic oligonucleotide
  Description of Combined DNA/RNA Molecule: Synthetic oligonucleotide
tcacugagaauacugucccuutu

SEQ ID NO: 1719 - DNA, 23 bp, Artificial Sequence
  Description of Artificial Sequence: Synthetic oligonucleotide
  Description of Combined DNA/RNA Molecule: Synthetic oligonucleotide
tcacugagaauacugucccuutu

SEQ ID NO: 1720 - DNA, 23 bp, Artificial Sequence
  Description of Artificial Sequence: Synthetic oligonucleotide
  Description of Combined DNA/RNA Molecule: Synthetic oligonucleotide
tcacugagaauacugucccuutu

SEQ ID NO: 1721 - DNA, 23 bp, Artificial Sequence
  Description of Artificial Sequence: Synthetic oligonucleotide
  Description of Combined DNA/RNA Molecule: Synthetic oligonucleotide
tcacugagaauacugucccuutu

SEQ ID NO: 1722 - DNA, 23 bp, Artificial Sequence
  Description of Artificial Sequence: Synthetic oligonucleotide
  Description of Combined DNA/RNA Molecule: Synthetic oligonucleotide
tcacugagaauacugucccuutu

SEQ ID NO: 1723 - DNA, 23 bp, Artificial Sequence
  Description of Artificial Sequence: Synthetic oligonucleotide
  Description of Combined DNA/RNA Molecule: Synthetic oligonucleotide
tcacugagaauacugucccuutu

SEQ ID NO: 1724 - DNA, 23 bp, Artificial Sequence
  Description of Artificial Sequence: Synthetic oligonucleotide
  Description of Combined DNA/RNA Molecule: Synthetic oligonucleotide
tcacugagaauacugucccuutu

SEQ ID NO: 1725 - DNA, 23 bp, Artificial Sequence
  Description of Artificial Sequence: Synthetic oligonucleotide
  Description of Combined DNA/RNA Molecule: Synthetic oligonucleotide
tcacugagaauacugucccuutu

SEQ ID NO: 1726 - DNA, 23 bp, Artificial Sequence
  Description of Artificial Sequence: Synthetic oligonucleotide
  Description of Combined DNA/RNA Molecule: Synthetic oligonucleotide
tcacugagaauacugucccuutu

SEQ ID NO: 1727 - DNA, 23 bp, Artificial Sequence
  Description of Artificial Sequence: Synthetic oligonucleotide
  Description of Combined DNA/RNA Molecule: Synthetic oligonucleotide
tcacugagaauacugucccuutu

SEQ ID NO: 1728 - DNA, 23 bp, Artificial Sequence
  Description of Artificial Sequence: Synthetic oligonucleotide
  Description of Combined DNA/RNA Molecule: Synthetic oligonucleotide
tcacugagaauacugucccuutu

SEQ ID NO: 1729 - DNA, 23 bp, Artificial Sequence
  Description of Artificial Sequence: Synthetic oligonucleotide
  Description of Combined DNA/RNA Molecule: Synthetic oligonucleotide
tcacugagaauacugucccuutu

SEQ ID NO: 1730 - DNA, 23 bp, Artificial Sequence
  Description of Artificial Sequence: Synthetic oligonucleotide
  Description of Combined DNA/RNA Molecule: Synthetic oligonucleotide
tcacugagaauacugucccuutu

SEQ ID NO: 1731 - DNA, 23 bp, Artificial Sequence
  Description of Artificial Sequence: Synthetic oligonucleotide
  Description of Combined DNA/RNA Molecule: Synthetic oligonucleotide
tcacugagaauacugucccuutu

SEQ ID NO: 1732 - DNA, 23 bp, Artificial Sequence
  Description of Artificial Sequence: Synthetic oligonucleotide
  Description of Combined DNA/RNA Molecule: Synthetic oligonucleotide
tcacugagaauacugucccuutu

SEQ ID NO: 1733 - DNA, 23 bp, Artificial Sequence
  Description of Artificial Sequence: Synthetic oligonucleotide
  Description of Combined DNA/RNA Molecule: Synthetic oligonucleotide
tcacugagaauacugucccuutu

SEQ ID NO: 1734 - DNA, 23 bp, Artificial Sequence
  Description of Artificial Sequence: Synthetic oligonucleotide
  Description of Combined DNA/RNA Molecule: Synthetic oligonucleotide
tcacugagaauacugucccuutu

SEQ ID NO: 1735 - DNA, 23 bp, Artificial Sequence
  Description of Artificial Sequence: Synthetic oligonucleotide
  Description of Combined DNA/RNA Molecule: Synthetic oligonucleotide
tcacugagaauacugucccuutu

SEQ ID NO: 1736 - DNA, 23 bp, Artificial Sequence
  Description of Artificial Sequence: Synthetic oligonucleotide
  Description of Combined DNA/RNA Molecule: Synthetic oligonucleotide
tagcuucuuguccagcuuuautu

SEQ ID NO: 1737 - DNA, 23 bp, Artificial Sequence
  Description of Artificial Sequence: Synthetic oligonucleotide
  Description of Combined DNA/RNA Molecule: Synthetic oligonucleotide
tagcuucuuguccagcuuuautu

SEQ ID NO: 1738 - DNA, 23 bp, Artificial Sequence
  Description of Artificial Sequence: Synthetic oligonucleotide
  Description of Combined DNA/RNA Molecule: Synthetic oligonucleotide
tagcuucuuguccagcuuuautu

SEQ ID NO: 1739 - DNA, 23 bp, Artificial Sequence
  Description of Artificial Sequence: Synthetic oligonucleotide
  Description of Combined DNA/RNA Molecule: Synthetic oligonucleotide
tagcuucuuguccagcuuuautu

SEQ ID NO: 1740 - DNA, 23 bp, Artificial Sequence
  Description of Artificial Sequence: Synthetic oligonucleotide
  Description of Combined DNA/RNA Molecule: Synthetic oligonucleotide
tagcuucuuguccagcuuuautu

SEQ ID NO: 1741 - DNA, 23 bp, Artificial Sequence
  Description of Artificial Sequence: Synthetic oligonucleotide
  Description of Combined DNA/RNA Molecule: Synthetic oligonucleotide
tagcuucuuguccagcuuuautu

SEQ ID NO: 1742 - DNA, 23 bp, Artificial Sequence
  Description of Artificial Sequence: Synthetic oligonucleotide
  Description of Combined DNA/RNA Molecule: Synthetic oligonucleotide
tagcuucuuguccagcuuuautu

SEQ ID NO: 1743 - DNA, 23 bp, Artificial Sequence
  Description of Artificial Sequence: Synthetic oligonucleotide
  Description of Combined DNA/RNA Molecule: Synthetic oligonucleotide
tagcuucuuguccagcuuuautu

SEQ ID NO: 1744 - DNA, 23 bp, Artificial Sequence
  Description of Artificial Sequence: Synthetic oligonucleotide
  Description of Combined DNA/RNA Molecule: Synthetic oligonucleotide
tagcuucuuguccagcuuuautu

SEQ ID NO: 1745 - DNA, 23 bp, Artificial Sequence
  Description of Artificial Sequence: Synthetic oligonucleotide
  Description of Combined DNA/RNA Molecule: Synthetic oligonucleotide
tagcuucuuguccagcuuuautu

SEQ ID NO: 1746 - DNA, 23 bp, Artificial Sequence
  Description of Artificial Sequence: Synthetic oligonucleotide
  Description of Combined DNA/RNA Molecule: Synthetic oligonucleotide
tuuuaagcaaccuacaggggctu

SEQ ID NO: 1747 - DNA, 23 bp, Artificial Sequence
  Description of Artificial Sequence: Synthetic oligonucleotide
  Description of Combined DNA/RNA Molecule: Synthetic oligonucleotide
tuuuuaagcaaccuacaggggtu

SEQ ID NO: 1748 - DNA, 23 bp, Artificial Sequence
  Description of Artificial Sequence: Synthetic oligonucleotide
  Description of Combined DNA/RNA Molecule: Synthetic oligonucleotide
tcuuuuaagcaaccuacagggtu

SEQ ID NO: 1749 - DNA, 23 bp, Artificial Sequence
  Description of Artificial Sequence: Synthetic oligonucleotide
  Description of Combined DNA/RNA Molecule: Synthetic oligonucleotide
tccuuuuaagcaaccuacaggtu

SEQ ID NO: 1750 - DNA, 23 bp, Artificial Sequence
  Description of Artificial Sequence: Synthetic oligonucleotide
  Description of Combined DNA/RNA Molecule: Synthetic oligonucleotide
tcccuuuuaagcaaccuacagtu

SEQ ID NO: 1751 - DNA, 23 bp, Artificial Sequence
  Description of Artificial Sequence: Synthetic oligonucleotide
  Description of Combined DNA/RNA Molecule: Synthetic oligonucleotide
tucccuuuuaagcaaccuacatu

SEQ ID NO: 1752 - DNA, 23 bp, Artificial Sequence
  Description of Artificial Sequence: Synthetic oligonucleotide
  Description of Combined DNA/RNA Molecule: Synthetic oligonucleotide
tgucccuuuuaagcaaccuactu

SEQ ID NO: 1753 - DNA, 23 bp, Artificial Sequence
  Description of Artificial Sequence: Synthetic oligonucleotide
  Description of Combined DNA/RNA Molecule: Synthetic oligonucleotide
tugucccuuuuaagcaaccuatu

SEQ ID NO: 1754 - DNA, 23 bp, Artificial Sequence
  Description of Artificial Sequence: Synthetic oligonucleotide
  Description of Combined DNA/RNA Molecule: Synthetic oligonucleotide
tcugucccuuuuaagcaaccutu

SEQ ID NO: 1755 - DNA, 23 bp, Artificial Sequence
  Description of Artificial Sequence: Synthetic oligonucleotide
  Description of Combined DNA/RNA Molecule: Synthetic oligonucleotide
tacugucccuuuuaagcaacctu

SEQ ID NO: 1756 - DNA, 23 bp, Artificial Sequence
  Description of Artificial Sequence: Synthetic oligonucleotide
  Description of Combined DNA/RNA Molecule: Synthetic oligonucleotide
tuacugucccuuuuaagcaactu

SEQ ID NO: 1757 - DNA, 23 bp, Artificial Sequence
  Description of Artificial Sequence: Synthetic oligonucleotide
  Description of Combined DNA/RNA Molecule: Synthetic oligonucleotide
tauacugucccuuuuaagcaatu

SEQ ID NO: 1758 - DNA, 23 bp, Artificial Sequence
  Description of Artificial Sequence: Synthetic oligonucleotide
  Description of Combined DNA/RNA Molecule: Synthetic oligonucleotide
taauacugucccuuuuaagcatu

SEQ ID NO: 1759 - DNA, 23 bp, Artificial Sequence
  Description of Artificial Sequence: Synthetic oligonucleotide
  Description of Combined DNA/RNA Molecule: Synthetic oligonucleotide
tgaauacugucccuuuuaagctu

SEQ ID NO: 1760 - DNA, 23 bp, Artificial Sequence
  Description of Artificial Sequence: Synthetic oligonucleotide
  Description of Combined DNA/RNA Molecule: Synthetic oligonucleotide
tagaauacugucccuuuuaagtu

SEQ ID NO: 1761 - DNA, 23 bp, Artificial Sequence
  Description of Artificial Sequence: Synthetic oligonucleotide
  Description of Combined DNA/RNA Molecule: Synthetic oligonucleotide
tgagaauacugucccuuuuaatu

SEQ ID NO: 1762 - DNA, 23 bp, Artificial Sequence
  Description of Artificial Sequence: Synthetic oligonucleotide
  Description of Combined DNA/RNA Molecule: Synthetic oligonucleotide
tugagaauacugucccuuuuatu

SEQ ID NO: 1763 - DNA, 23 bp, Artificial Sequence
  Description of Artificial Sequence: Synthetic oligonucleotide
  Description of Combined DNA/RNA Molecule: Synthetic oligonucleotide
tcugagaauacugucccuuuutu

SEQ ID NO: 1764 - DNA, 23 bp, Artificial Sequence
  Description of Artificial Sequence: Synthetic oligonucleotide
  Description of Combined DNA/RNA Molecule: Synthetic oligonucleotide
tacugagaauacugucccuuutu

SEQ ID NO: 1765 - DNA, 23 bp, Artificial Sequence
  Description of Artificial Sequence: Synthetic oligonucleotide
  Description of Combined DNA/RNA Molecule: Synthetic oligonucleotide
tgcacugagaauacugucccutu

SEQ ID NO: 1766 - DNA, 23 bp, Artificial Sequence
  Description of Artificial Sequence: Synthetic oligonucleotide
  Description of Combined DNA/RNA Molecule: Synthetic oligonucleotide
tagcacugagaauacuguccctu

SEQ ID NO: 1767 - DNA, 23 bp, Artificial Sequence
  Description of Artificial Sequence: Synthetic oligonucleotide
  Description of Combined DNA/RNA Molecule: Synthetic oligonucleotide
tgagcacugagaauacugucctu

SEQ ID NO: 1768 - DNA, 23 bp, Artificial Sequence
  Description of Artificial Sequence: Synthetic oligonucleotide
  Description of Combined DNA/RNA Molecule: Synthetic oligonucleotide
tagagcacugagaauacuguctu

SEQ ID NO: 1769 - DNA, 23 bp, Artificial Sequence
  Description of Artificial Sequence: Synthetic oligonucleotide
  Description of Combined DNA/RNA Molecule: Synthetic oligonucleotide
tgagagcacugagaauacugutu

SEQ ID NO: 1770 - DNA, 23 bp, Artificial Sequence
  Description of Artificial Sequence: Synthetic oligonucleotide
  Description of Combined DNA/RNA Molecule: Synthetic oligonucleotide
tggagagcacugagaauacugtu

SEQ ID NO: 1771 - DNA, 23 bp, Artificial Sequence
  Description of Artificial Sequence: Synthetic oligonucleotide
  Description of Combined DNA/RNA Molecule: Synthetic oligonucleotide
taggagagcacugagaauacutu

SEQ ID NO: 1772 - DNA, 23 bp, Artificial Sequence
  Description of Artificial Sequence: Synthetic oligonucleotide
  Description of Combined DNA/RNA Molecule: Synthetic oligonucleotide
tuaggagagcacugagaauactu

SEQ ID NO: 1773 - DNA, 23 bp, Artificial Sequence
  Description of Artificial Sequence: Synthetic oligonucleotide
  Description of Combined DNA/RNA Molecule: Synthetic oligonucleotide
tguaggagagcacugagaauatu

SEQ ID NO: 1774 - DNA, 23 bp, Artificial Sequence
  Description of Artificial Sequence: Synthetic oligonucleotide
  Description of Combined DNA/RNA Molecule: Synthetic oligonucleotide
tgguaggagagcacugagaautu

SEQ ID NO: 1775 - DNA, 23 bp, Artificial Sequence
  Description of Artificial Sequence: Synthetic oligonucleotide
  Description of Combined DNA/RNA Molecule: Synthetic oligonucleotide
tggguaggagagcacugagaatu

SEQ ID NO: 1776 - DNA, 23 bp, Artificial Sequence
  Description of Artificial Sequence: Synthetic oligonucleotide
  Description of Combined DNA/RNA Molecule: Synthetic oligonucleotide
tgggguaggagagcacugagatu

SEQ ID NO: 1777 - DNA, 23 bp, Artificial Sequence
  Description of Artificial Sequence: Synthetic oligonucleotide
  Description of Combined DNA/RNA Molecule: Synthetic oligonucleotide
tugggguaggagagcacugagtu

SEQ ID NO: 1778 - DNA, 23 bp, Artificial Sequence
  Description of Artificial Sequence: Synthetic oligonucleotide
  Description of Combined DNA/RNA Molecule: Synthetic oligonucleotide
tgugggguaggagagcacugatu

SEQ ID NO: 1779 - DNA, 23 bp, Artificial Sequence
  Description of Artificial Sequence: Synthetic oligonucleotide
  Description of Combined DNA/RNA Molecule: Synthetic oligonucleotide
tggugggguaggagagcacugtu

SEQ ID NO: 1780 - DNA, 23 bp, Artificial Sequence
  Description of Artificial Sequence: Synthetic oligonucleotide
  Description of Combined DNA/RNA Molecule: Synthetic oligonucleotide
taggugggguaggagagcacutu

SEQ ID NO: 1781 - DNA, 23 bp, Artificial Sequence
  Description of Artificial Sequence: Synthetic oligonucleotide
  Description of Combined DNA/RNA Molecule: Synthetic oligonucleotide
tgaggugggguaggagagcactu

SEQ ID NO: 1782 - DNA, 23 bp, Artificial Sequence
  Description of Artificial Sequence: Synthetic oligonucleotide
  Description of Combined DNA/RNA Molecule: Synthetic oligonucleotide
tugaggugggguaggagagcatu

SEQ ID NO: 1783 - DNA, 23 bp, Artificial Sequence
  Description of Artificial Sequence: Synthetic oligonucleotide
  Description of Combined DNA/RNA Molecule: Synthetic oligonucleotide
taugaggugggguaggagagctu

SEQ ID NO: 1784 - DNA, 23 bp, Artificial Sequence
  Description of Artificial Sequence: Synthetic oligonucleotide
  Description of Combined DNA/RNA Molecule: Synthetic oligonucleotide
tcaugaggugggguaggagagtu

SEQ ID NO: 1785 - DNA, 23 bp, Artificial Sequence
  Description of Artificial Sequence: Synthetic oligonucleotide
  Description of Combined DNA/RNA Molecule: Synthetic oligonucleotide
tgcaugaggugggguaggagatu

SEQ ID NO: 1786 - DNA, 23 bp, Artificial Sequence
  Description of Artificial Sequence: Synthetic oligonucleotide
  Description of Combined DNA/RNA Molecule: Synthetic oligonucleotide
tuuaagcaaccuacaggggcatu

SEQ ID NO: 1787 - DNA, 23 bp, Artificial Sequence
  Description of Artificial Sequence: Synthetic oligonucleotide
  Description of Combined DNA/RNA Molecule: Synthetic oligonucleotide
tuuuaagcaaccuacaggggctu

SEQ ID NO: 1788 - DNA, 23 bp, Artificial Sequence
  Description of Artificial Sequence: Synthetic oligonucleotide
  Description of Combined DNA/RNA Molecule: Synthetic oligonucleotide
tuuuuaagcaaccuacaggggtu

SEQ ID NO: 1789 - DNA, 23 bp, Artificial Sequence
  Description of Artificial Sequence: Synthetic oligonucleotide
  Description of Combined DNA/RNA Molecule: Synthetic oligonucleotide
tcuuuuaagcaaccuacagggtu

SEQ ID NO: 1790 - DNA, 23 bp, Artificial Sequence
  Description of Artificial Sequence: Synthetic oligonucleotide
  Description of Combined DNA/RNA Molecule: Synthetic oligonucleotide
tccuuuuaagcaaccuacaggtu

SEQ ID NO: 1791 - DNA, 23 bp, Artificial Sequence
  Description of Artificial Sequence: Synthetic oligonucleotide
  Description of Combined DNA/RNA Molecule: Synthetic oligonucleotide
tcccuuuuaagcaaccuacagtu

SEQ ID NO: 1792 - DNA, 23 bp, Artificial Sequence
  Description of Artificial Sequence: Synthetic oligonucleotide
  Description of Combined DNA/RNA Molecule: Synthetic oligonucleotide
tucccuuuuaagcaaccuacatu

SEQ ID NO: 1793 - DNA, 23 bp, Artificial Sequence
  Description of Artificial Sequence: Synthetic oligonucleotide
  Description of Combined DNA/RNA Molecule: Synthetic oligonucleotide
tgucccuuuuaagcaaccuactu

SEQ ID NO: 1794 - DNA, 23 bp, Artificial Sequence
  Description of Artificial Sequence: Synthetic oligonucleotide
  Description of Combined DNA/RNA Molecule: Synthetic oligonucleotide
tugucccuuuuaagcaaccuatu

SEQ ID NO: 1795 - DNA, 23 bp, Artificial Sequence
  Description of Artificial Sequence: Synthetic oligonucleotide
  Description of Combined DNA/RNA Molecule: Synthetic oligonucleotide
tcugucccuuuuaagcaaccutu

SEQ ID NO: 1796 - DNA, 23 bp, Artificial Sequence
  Description of Artificial Sequence: Synthetic oligonucleotide
  Description of Combined DNA/RNA Molecule: Synthetic oligonucleotide
tacugucccuuuuaagcaacctu

SEQ ID NO: 1797 - DNA, 23 bp, Artificial Sequence
  Description of Artificial Sequence: Synthetic oligonucleotide
  Description of Combined DNA/RNA Molecule: Synthetic oligonucleotide
tuacugucccuuuuaagcaactu

SEQ ID NO: 1798 - DNA, 23 bp, Artificial Sequence
  Description of Artificial Sequence: Synthetic oligonucleotide
  Description of Combined DNA/RNA Molecule: Synthetic oligonucleotide
tauacugucccuuuuaagcaatu

SEQ ID NO: 1799 - DNA, 23 bp, Artificial Sequence
  Description of Artificial Sequence: Synthetic oligonucleotide
  Description of Combined DNA/RNA Molecule: Synthetic oligonucleotide
taauacugucccuuuuaagcatu

SEQ ID NO: 1800 - DNA, 23 bp, Artificial Sequence
  Description of Artificial Sequence: Synthetic oligonucleotide
  Description of Combined DNA/RNA Molecule: Synthetic oligonucleotide
tgaauacugucccuuuuaagctu

SEQ ID NO: 1801 - DNA, 23 bp, Artificial Sequence
  Description of Artificial Sequence: Synthetic oligonucleotide
  Description of Combined DNA/RNA Molecule: Synthetic oligonucleotide
tagaauacugucccuuuuaagtu

SEQ ID NO: 1802 - DNA, 23 bp, Artificial Sequence
  Description of Artificial Sequence: Synthetic oligonucleotide
  Description of Combined DNA/RNA Molecule: Synthetic oligonucleotide
tgagaauacugucccuuuuaatu

SEQ ID NO: 1803 - DNA, 23 bp, Artificial Sequence
  Description of Artificial Sequence: Synthetic oligonucleotide
  Description of Combined DNA/RNA Molecule: Synthetic oligonucleotide
tugagaauacugucccuuuuatu

SEQ ID NO: 1804 - DNA, 23 bp, Artificial Sequence
  Description of Artificial Sequence: Synthetic oligonucleotide
  Description of Combined DNA/RNA Molecule: Synthetic oligonucleotide
tcugagaauacugucccuuuutu

SEQ ID NO: 1805 - DNA, 23 bp, Artificial Sequence
  Description of Artificial Sequence: Synthetic oligonucleotide
  Description of Combined DNA/RNA Molecule: Synthetic oligonucleotide
tacugagaauacugucccuuutu

SEQ ID NO: 1806 - DNA, 23 bp, Artificial Sequence
  Description of Artificial Sequence: Synthetic oligonucleotide
  Description of Combined DNA/RNA Molecule: Synthetic oligonucleotide
tgcacugagaauacugucccutu

SEQ ID NO: 1807 - DNA, 23 bp, Artificial Sequence
  Description of Artificial Sequence: Synthetic oligonucleotide
  Description of Combined DNA/RNA Molecule: Synthetic oligonucleotide
tagcacugagaauacuguccctu

SEQ ID NO: 1808 - DNA, 23 bp, Artificial Sequence
  Description of Artificial Sequence: Synthetic oligonucleotide
  Description of Combined DNA/RNA Molecule: Synthetic oligonucleotide
tgagcacugagaauacugucctu

SEQ ID NO: 1809 - DNA, 23 bp, Artificial Sequence
  Description of Artificial Sequence: Synthetic oligonucleotide
  Description of Combined DNA/RNA Molecule: Synthetic oligonucleotide
tagagcacugagaauacuguctu

SEQ ID NO: 1810 - DNA, 23 bp, Artificial Sequence
  Description of Artificial Sequence: Synthetic oligonucleotide
  Description of Combined DNA/RNA Molecule: Synthetic oligonucleotide
tgagagcacugagaauacugutu

SEQ ID NO: 1811 - DNA, 23 bp, Artificial Sequence
  Description of Artificial Sequence: Synthetic oligonucleotide
  Description of Combined DNA/RNA Molecule: Synthetic oligonucleotide
tggagagcacugagaauacugtu

SEQ ID NO: 1812 - DNA, 23 bp, Artificial Sequence
  Description of Artificial Sequence: Synthetic oligonucleotide
  Description of Combined DNA/RNA Molecule: Synthetic oligonucleotide
taggagagcacugagaauacutu

SEQ ID NO: 1813 - DNA, 23 bp, Artificial Sequence
  Description of Artificial Sequence: Synthetic oligonucleotide
  Description of Combined DNA/RNA Molecule: Synthetic oligonucleotide
tuaggagagcacugagaauactu

SEQ ID NO: 1814 - DNA, 23 bp, Artificial Sequence
  Description of Artificial Sequence: Synthetic oligonucleotide
  Description of Combined DNA/RNA Molecule: Synthetic oligonucleotide
tguaggagagcacugagaauatu

SEQ ID NO: 1815 - DNA, 23 bp, Artificial Sequence
  Description of Artificial Sequence: Synthetic oligonucleotide
  Description of Combined DNA/RNA Molecule: Synthetic oligonucleotide
tgguaggagagcacugagaautu

SEQ ID NO: 1816 - DNA, 23 bp, Artificial Sequence
  Description of Artificial Sequence: Synthetic oligonucleotide
  Description of Combined DNA/RNA Molecule: Synthetic oligonucleotide
tggguaggagagcacugagaatu

SEQ ID NO: 1817 - DNA, 23 bp, Artificial Sequence
  Description of Artificial Sequence: Synthetic oligonucleotide
  Description of Combined DNA/RNA Molecule: Synthetic oligonucleotide
tgggguaggagagcacugagatu

SEQ ID NO: 1818 - DNA, 23 bp, Artificial Sequence
  Description of Artificial Sequence: Synthetic oligonucleotide
  Description of Combined DNA/RNA Molecule: Synthetic oligonucleotide
tugggguaggagagcacugagtu

SEQ ID NO: 1819 - DNA, 23 bp, Artificial Sequence
  Description of Artificial Sequence: Synthetic oligonucleotide
  Description of Combined DNA/RNA Molecule: Synthetic oligonucleotide
tgugggguaggagagcacugatu

SEQ ID NO: 1820 - DNA, 23 bp, Artificial Sequence
  Description of Artificial Sequence: Synthetic oligonucleotide
  Description of Combined DNA/RNA Molecule: Synthetic oligonucleotide
tggugggguaggagagcacugtu

SEQ ID NO: 1821 - DNA, 23 bp, Artificial Sequence
  Description of Artificial Sequence: Synthetic oligonucleotide
  Description of Combined DNA/RNA Molecule: Synthetic oligonucleotide
taggugggguaggagagcacutu

SEQ ID NO: 1822 - DNA, 23 bp, Artificial Sequence
  Description of Artificial Sequence: Synthetic oligonucleotide
  Description of Combined DNA/RNA Molecule: Synthetic oligonucleotide
tgaggugggguaggagagcactu

SEQ ID NO: 1823 - DNA, 23 bp, Artificial Sequence
  Description of Artificial Sequence: Synthetic oligonucleotide
  Description of Combined DNA/RNA Molecule: Synthetic oligonucleotide
tugaggugggguaggagagcatu

SEQ ID NO: 1824 - DNA, 23 bp, Artificial Sequence
  Description of Artificial Sequence: Synthetic oligonucleotide
  Description of Combined DNA/RNA Molecule: Synthetic oligonucleotide
taugaggugggguaggagagctu

SEQ ID NO: 1825 - DNA, 23 bp, Artificial Sequence
  Description of Artificial Sequence: Synthetic oligonucleotide
  Description of Combined DNA/RNA Molecule: Synthetic oligonucleotide
tcaugaggugggguaggagagtu

SEQ ID NO: 1826 - DNA, 23 bp, Artificial Sequence
  Description of Artificial Sequence: Synthetic oligonucleotide
  Description of Combined DNA/RNA Molecule: Synthetic oligonucleotide
tgcaugaggugggguaggagatu

SEQ ID NO: 1827 - DNA, 23 bp, Artificial Sequence
  Description of Artificial Sequence: Synthetic oligonucleotide
  Description of Combined DNA/RNA Molecule: Synthetic oligonucleotide
tuuaagcaaccuacaggggcatu

SEQ ID NO: 1828 - DNA, 23 bp, Artificial Sequence
  Description of Artificial Sequence: Synthetic oligonucleotide
  Description of Combined DNA/RNA Molecule: Synthetic oligonucleotide
tgccacuguagaaaggcaugatu

SEQ ID NO: 1829 - DNA, 23 bp, Artificial Sequence
  Description of Artificial Sequence: Synthetic oligonucleotide
  Description of Combined DNA/RNA Molecule: Synthetic oligonucleotide
tgccacuguagaaaggcaugatu

SEQ ID NO: 1830 - DNA, 23 bp, Artificial Sequence
  Description of Artificial Sequence: Synthetic oligonucleotide
  Description of Combined DNA/RNA Molecule: Synthetic oligonucleotide
tgccacuguagaaaggcaugatu

SEQ ID NO: 1831 - DNA, 23 bp, Artificial Sequence
  Description of Artificial Sequence: Synthetic oligonucleotide
  Description of Combined DNA/RNA Molecule: Synthetic oligonucleotide
tgccacuguagaaaggcaugatu

SEQ ID NO: 1832 - DNA, 20 bp, Artificial Sequence
  Description of Artificial Sequence: Synthetic oligonucleotide
gcactgagaatactgtccct

SEQ ID NO: 1833 - DNA, 20 bp, Artificial Sequence
  Description of Artificial Sequence: Synthetic oligonucleotide
cactgagaatactgtccctt

SEQ ID NO: 1834 - DNA, 20 bp, Artificial Sequence
  Description of Artificial Sequence: Synthetic oligonucleotide
actgagaatactgtcccttt

SEQ ID NO: 1835 - DNA, 20 bp, Artificial Sequence
  Description of Artificial Sequence: Synthetic oligonucleotide
ctgagaatactgtccctttt

SEQ ID NO: 1836 - DNA, 20 bp, Artificial Sequence
  Description of Artificial Sequence: Synthetic oligonucleotide
tgagaatactgtccctttta

SEQ ID NO: 1837 - DNA, 20 bp, Artificial Sequence
  Description of Artificial Sequence: Synthetic oligonucleotide
gagaatactgtcccttttaa

SEQ ID NO: 1838 - DNA, 20 bp, Artificial Sequence
  Description of Artificial Sequence: Synthetic oligonucleotide
agaatactgtcccttttaag

SEQ ID NO: 1839 - DNA, 20 bp, Artificial Sequence
  Description of Artificial Sequence: Synthetic oligonucleotide
gaatactgtcccttttaagc

SEQ ID NO: 1840 - DNA, 20 bp, Artificial Sequence
  Description of Artificial Sequence: Synthetic oligonucleotide
aatactgtcccttttaagca

SEQ ID NO: 1841 - DNA, 20 bp, Artificial Sequence
  Description of Artificial Sequence: Synthetic oligonucleotide
atactgtcccttttaagcaa

SEQ ID NO: 1842 - DNA, 20 bp, Artificial Sequence
  Description of Artificial Sequence: Synthetic oligonucleotide
tactgtcccttttaagcaac

SEQ ID NO: 1843 - DNA, 20 bp, Artificial Sequence
  Description of Artificial Sequence: Synthetic oligonucleotide
actgtcccttttaagcaacc

SEQ ID NO: 1844 - DNA, 20 bp, Artificial Sequence
  Description of Artificial Sequence: Synthetic oligonucleotide
ctgtcccttttaagcaacct

SEQ ID NO: 1845 - DNA, 20 bp, Artificial Sequence
  Description of Artificial Sequence: Synthetic oligonucleotide
tgtcccttttaagcaaccta

SEQ ID NO: 1846 - DNA, 20 bp, Artificial Sequence
  Description of Artificial Sequence: Synthetic oligonucleotide
gtcccttttaagcaacctac

SEQ ID NO: 1847 - DNA, 20 bp, Artificial Sequence
  Description of Artificial Sequence: Synthetic oligonucleotide
tcccttttaagcaacctaca

SEQ ID NO: 1848 - DNA, 20 bp, Artificial Sequence
  Description of Artificial Sequence: Synthetic oligonucleotide
cccttttaagcaacctacag

SEQ ID NO: 1849 - DNA, 20 bp, Artificial Sequence
  Description of Artificial Sequence: Synthetic oligonucleotide
ccttttaagcaacctacagg

SEQ ID NO: 1850 - DNA, 20 bp, Artificial Sequence
  Description of Artificial Sequence: Synthetic oligonucleotide
cttttaagcaacctacaggg

SEQ ID NO: 1851 - DNA, 20 bp, Artificial Sequence
  Description of Artificial Sequence: Synthetic oligonucleotide
ttttaagcaacctacagggg

SEQ ID NO: 1852 - DNA, 20 bp, Artificial Sequence
  Description of Artificial Sequence: Synthetic oligonucleotide
tttaagcaacctacaggggc

SEQ ID NO: 1853 - DNA, 20 bp, Artificial Sequence
  Description of Artificial Sequence: Synthetic oligonucleotide
ttaagcaacctacaggggca

SEQ ID NO: 1854 - DNA, 20 bp, Artificial Sequence
  Description of Artificial Sequence: Synthetic oligonucleotide
taagcaacctacaggggcag

SEQ ID NO: 1855 - DNA, 20 bp, Artificial Sequence
  Description of Artificial Sequence: Synthetic oligonucleotide
aagcaacctacaggggcagc

SEQ ID NO: 1856 - DNA, 20 bp, Artificial Sequence
  Description of Artificial Sequence: Synthetic oligonucleotide
agcaacctacaggggcagcc

SEQ ID NO: 1857 - DNA, 20 bp, Artificial Sequence
  Description of Artificial Sequence: Synthetic oligonucleotide
gcaacctacaggggcagccc

SEQ ID NO: 1858 - DNA, 20 bp, Artificial Sequence
  Description of Artificial Sequence: Synthetic oligonucleotide
caacctacaggggcagccct

SEQ ID NO: 1859 - DNA, 20 bp, Artificial Sequence
  Description of Artificial Sequence: Synthetic oligonucleotide
aacctacaggggcagccctg

SEQ ID NO: 1860 - DNA, 20 bp, Artificial Sequence
  Description of Artificial Sequence: Synthetic oligonucleotide
acctacaggggcagccctgg

SEQ ID NO: 1861 - DNA, 20 bp, Artificial Sequence
  Description of Artificial Sequence: Synthetic oligonucleotide
  Description of Combined DNA/RNA Molecule: Synthetic oligonucleotide
gcactgagaatactgucccu

SEQ ID NO: 1862 - DNA, 20 bp, Artificial Sequence
  Description of Artificial Sequence: Synthetic oligonucleotide
  Description of Combined DNA/RNA Molecule: Synthetic oligonucleotide
cactgagaatactgtcccuu

SEQ ID NO: 1863 - DNA, 20 bp, Artificial Sequence
  Description of Artificial Sequence: Synthetic oligonucleotide
  Description of Combined DNA/RNA Molecule: Synthetic oligonucleotide
actgagaatactgtcccuuu

SEQ ID NO: 1864 - DNA, 20 bp, Artificial Sequence
  Description of Artificial Sequence: Synthetic oligonucleotide
  Description of Combined DNA/RNA Molecule: Synthetic oligonucleotide
ctgagaatactgtcccuuuu

SEQ ID NO: 1865 - DNA, 20 bp, Artificial Sequence
  Description of Artificial Sequence: Synthetic oligonucleotide
  Description of Combined DNA/RNA Molecule: Synthetic oligonucleotide
tgagaatactgtcccuuuua

SEQ ID NO: 1866 - DNA, 20 bp, Artificial Sequence
  Description of Artificial Sequence: Synthetic oligonucleotide
  Description of Combined DNA/RNA Molecule: Synthetic oligonucleotide
gagaatactgtccctuuuaa

SEQ ID NO: 1867 - DNA, 20 bp, Artificial Sequence
  Description of Artificial Sequence: Synthetic oligonucleotide
  Description of Combined DNA/RNA Molecule: Synthetic oligonucleotide
agaatactgtcccttuuaag

SEQ ID NO: 1868 - DNA, 20 bp, Artificial Sequence
  Description of Artificial Sequence: Synthetic oligonucleotide
  Description of Combined DNA/RNA Molecule: Synthetic oligonucleotide
gaatactgtccctttuaagc

SEQ ID NO: 1869 - DNA, 20 bp, Artificial Sequence
  Description of Artificial Sequence: Synthetic oligonucleotide
aatactgtcccttttaagca

SEQ ID NO: 1870 - DNA, 20 bp, Artificial Sequence
  Description of Artificial Sequence: Synthetic oligonucleotide
atactgtcccttttaagcaa

SEQ ID NO: 1871 - DNA, 20 bp, Artificial Sequence
  Description of Artificial Sequence: Synthetic oligonucleotide
tactgtcccttttaagcaac

SEQ ID NO: 1872 - DNA, 20 bp, Artificial Sequence
  Description of Artificial Sequence: Synthetic oligonucleotide
actgtcccttttaagcaacc

SEQ ID NO: 1873 - DNA, 20 bp, Artificial Sequence
  Description of Artificial Sequence: Synthetic oligonucleotide
  Description of Combined DNA/RNA Molecule: Synthetic oligonucleotide
ctgtcccttttaagcaaccu

SEQ ID NO: 1874 - DNA, 20 bp, Artificial Sequence
  Description of Artificial Sequence: Synthetic oligonucleotide
  Description of Combined DNA/RNA Molecule: Synthetic oligonucleotide
tgtcccttttaagcaaccua

SEQ ID NO: 1875 - DNA, 20 bp, Artificial Sequence
  Description of Artificial Sequence: Synthetic oligonucleotide
  Description of Combined DNA/RNA Molecule: Synthetic oligonucleotide
gtcccttttaagcaaccuac

SEQ ID NO: 1876 - DNA, 20 bp, Artificial Sequence
  Description of Artificial Sequence: Synthetic oligonucleotide
  Description of Combined DNA/RNA Molecule: Synthetic oligonucleotide
tcccttttaagcaaccuaca

SEQ ID NO: 1877 - DNA, 20 bp, Artificial Sequence
  Description of Artificial Sequence: Synthetic oligonucleotide
  Description of Combined DNA/RNA Molecule: Synthetic oligonucleotide
cccttttaagcaaccuacag

SEQ ID NO: 1878 - DNA, 20 bp, Artificial Sequence
  Description of Artificial Sequence: Synthetic oligonucleotide
ccttttaagcaacctacagg

SEQ ID NO: 1879 - DNA, 20 bp, Artificial Sequence
  Description of Artificial Sequence: Synthetic oligonucleotide
cttttaagcaacctacaggg

SEQ ID NO: 1880 - DNA, 20 bp, Artificial Sequence
  Description of Artificial Sequence: Synthetic oligonucleotide
ttttaagcaacctacagggg

SEQ ID NO: 1881 - DNA, 20 bp, Artificial Sequence
  Description of Artificial Sequence: Synthetic oligonucleotide
tttaagcaacctacaggggc

SEQ ID NO: 1882 - DNA, 20 bp, Artificial Sequence
  Description of Artificial Sequence: Synthetic oligonucleotide
ttaagcaacctacaggggca

SEQ ID NO: 1883 - DNA, 20 bp, Artificial Sequence
  Description of Artificial Sequence: Synthetic oligonucleotide
taagcaacctacaggggcag

SEQ ID NO: 1884 - DNA, 20 bp, Artificial Sequence
  Description of Artificial Sequence: Synthetic oligonucleotide
aagcaacctacaggggcagc

SEQ ID NO: 1885 - DNA, 20 bp, Artificial Sequence
  Description of Artificial Sequence: Synthetic oligonucleotide
agcaacctacaggggcagcc

SEQ ID NO: 1886 - DNA, 20 bp, Artificial Sequence
  Description of Artificial Sequence: Synthetic oligonucleotide
gcaacctacaggggcagccc

SEQ ID NO: 1887 - DNA, 20 bp, Artificial Sequence
  Description of Artificial Sequence: Synthetic oligonucleotide
  Description of Combined DNA/RNA Molecule: Synthetic oligonucleotide
caacctacaggggcagcccu

SEQ ID NO: 1888 - DNA, 20 bp, Artificial Sequence
  Description of Artificial Sequence: Synthetic oligonucleotide
  Description of Combined DNA/RNA Molecule: Synthetic oligonucleotide
aacctacaggggcagcccug

SEQ ID NO: 1889 - DNA, 20 bp, Artificial Sequence
  Description of Artificial Sequence: Synthetic oligonucleotide
  Description of Combined DNA/RNA Molecule: Synthetic oligonucleotide
acctacaggggcagcccugg

SEQ ID NO: 1890 - DNA, 20 bp, Artificial Sequence
  Description of Artificial Sequence: Synthetic oligonucleotide
  Description of Combined DNA/RNA Molecule: Synthetic oligonucleotide
agcttcttgtccagcuuuau

SEQ ID NO: 1891 - DNA, 20 bp, Artificial Sequence
  Description of Artificial Sequence: Synthetic oligonucleotide
  Description of Combined DNA/RNA Molecule: Synthetic oligonucleotide
gcacugagaatactgtccct

SEQ ID NO: 1892 - DNA, 20 bp, Artificial Sequence
  Description of Artificial Sequence: Synthetic oligonucleotide
  Description of Combined DNA/RNA Molecule: Synthetic oligonucleotide
cacugagaatactgtccctt

SEQ ID NO: 1893 - DNA, 20 bp, Artificial Sequence
  Description of Artificial Sequence: Synthetic oligonucleotide
  Description of Combined DNA/RNA Molecule: Synthetic oligonucleotide
acugagaatactgtcccttt

SEQ ID NO: 1894 - DNA, 20 bp, Artificial Sequence
  Description of Artificial Sequence: Synthetic oligonucleotide
  Description of Combined DNA/RNA Molecule: Synthetic oligonucleotide
cugagaatactgtccctttt

SEQ ID NO: 1895 - DNA, 20 bp, Artificial Sequence
  Description of Artificial Sequence: Synthetic oligonucleotide
  Description of Combined DNA/RNA Molecule: Synthetic oligonucleotide
ugagaatactgtccctttta

SEQ ID NO: 1896 - DNA, 20 bp, Artificial Sequence
  Description of Artificial Sequence: Synthetic oligonucleotide
gagaatactgtcccttttaa

SEQ ID NO: 1897 - DNA, 20 bp, Artificial Sequence
  Description of Artificial Sequence: Synthetic oligonucleotide
  Description of Combined DNA/RNA Molecule: Synthetic oligonucleotide
agaauactgtcccttttaag

SEQ ID NO: 1898 - DNA, 20 bp, Artificial Sequence
  Description of Artificial Sequence: Synthetic oligonucleotide
  Description of Combined DNA/RNA Molecule: Synthetic oligonucleotide
gaauactgtcccttttaagc

SEQ ID NO: 1899 - DNA, 20 bp, Artificial Sequence
  Description of Artificial Sequence: Synthetic oligonucleotide
  Description of Combined DNA/RNA Molecule: Synthetic oligonucleotide
aauactgtcccttttaagca

SEQ ID NO: 1900 - DNA, 20 bp, Artificial Sequence
  Description of Artificial Sequence: Synthetic oligonucleotide
  Description of Combined DNA/RNA Molecule: Synthetic oligonucleotide
auacugtcccttttaagcaa

SEQ ID NO: 1901 - DNA, 20 bp, Artificial Sequence
  Description of Artificial Sequence: Synthetic oligonucleotide
  Description of Combined DNA/RNA Molecule: Synthetic oligonucleotide
uacugtcccttttaagcaac

SEQ ID NO: 1902 - DNA, 20 bp, Artificial Sequence
  Description of Artificial Sequence: Synthetic oligonucleotide
  Description of Combined DNA/RNA Molecule: Synthetic oligonucleotide
acugucccttttaagcaacc

SEQ ID NO: 1903 - DNA, 20 bp, Artificial Sequence
  Description of Artificial Sequence: Synthetic oligonucleotide
  Description of Combined DNA/RNA Molecule: Synthetic oligonucleotide
cugucccttttaagcaacct

SEQ ID NO: 1904 - DNA, 20 bp, Artificial Sequence
  Description of Artificial Sequence: Synthetic oligonucleotide
  Description of Combined DNA/RNA Molecule: Synthetic oligonucleotide
ugucccttttaagcaaccta

SEQ ID NO: 1905 - DNA, 20 bp, Artificial Sequence
  Description of Artificial Sequence: Synthetic oligonucleotide
  Description of Combined DNA/RNA Molecule: Synthetic oligonucleotide
gucccttttaagcaacctac

SEQ ID NO: 1906 - DNA, 20 bp, Artificial Sequence
  Description of Artificial Sequence: Synthetic oligonucleotide
  Description of Combined DNA/RNA Molecule: Synthetic oligonucleotide
ucccutttaagcaacctaca

SEQ ID NO: 1907 - DNA, 20 bp, Artificial Sequence
  Description of Artificial Sequence: Synthetic oligonucleotide
  Description of Combined DNA/RNA Molecule: Synthetic oligonucleotide
cccuuttaagcaacctacag

SEQ ID NO: 1908 - DNA, 20 bp, Artificial Sequence
  Description of Artificial Sequence: Synthetic oligonucleotide
  Description of Combined DNA/RNA Molecule: Synthetic oligonucleotide
ccuuutaagcaacctacagg

SEQ ID NO: 1909 - DNA, 20 bp, Artificial Sequence
  Description of Artificial Sequence: Synthetic oligonucleotide
  Description of Combined DNA/RNA Molecule: Synthetic oligonucleotide
cuuuuaagcaacctacaggg

SEQ ID NO: 1910 - DNA, 20 bp, Artificial Sequence
  Description of Artificial Sequence: Synthetic oligonucleotide
  Description of Combined DNA/RNA Molecule: Synthetic oligonucleotide
uuuuaagcaacctacagggg

SEQ ID NO: 1911 - DNA, 20 bp, Artificial Sequence
  Description of Artificial Sequence: Synthetic oligonucleotide
  Description of Combined DNA/RNA Molecule: Synthetic oligonucleotide
uuuaagcaacctacaggggc

SEQ ID NO: 1912 - DNA, 20 bp, Artificial Sequence
  Description of Artificial Sequence: Synthetic oligonucleotide
  Description of Combined DNA/RNA Molecule: Synthetic oligonucleotide
uuaagcaacctacaggggca

SEQ ID NO: 1913 - DNA, 20 bp, Artificial Sequence
  Description of Artificial Sequence: Synthetic oligonucleotide
  Description of Combined DNA/RNA Molecule: Synthetic oligonucleotide
uaagcaacctacaggggcag

SEQ ID NO: 1914 - DNA, 20 bp, Artificial Sequence
  Description of Artificial Sequence: Synthetic oligonucleotide
aagcaacctacaggggcagc

SEQ ID NO: 1915 - DNA, 20 bp, Artificial Sequence
  Description of Artificial Sequence: Synthetic oligonucleotide
agcaacctacaggggcagcc

SEQ ID NO: 1916 - DNA, 20 bp, Artificial Sequence
  Description of Artificial Sequence: Synthetic oligonucleotide
gcaacctacaggggcagccc

SEQ ID NO: 1917 - DNA, 20 bp, Artificial Sequence
  Description of Artificial Sequence: Synthetic oligonucleotide
caacctacaggggcagccct

SEQ ID NO: 1918 - DNA, 20 bp, Artificial Sequence
  Description of Artificial Sequence: Synthetic oligonucleotide
  Description of Combined DNA/RNA Molecule: Synthetic oligonucleotide
aaccuacaggggcagccctg

SEQ ID NO: 1919 - DNA, 20 bp, Artificial Sequence
  Description of Artificial Sequence: Synthetic oligonucleotide
  Description of Combined DNA/RNA Molecule: Synthetic oligonucleotide
accuacaggggcagccctgg

SEQ ID NO: 1920 - DNA, 20 bp, Artificial Sequence
  Description of Artificial Sequence: Synthetic oligonucleotide
  Description of Combined DNA/RNA Molecule: Synthetic oligonucleotide
cuuguccagctttattggga

SEQ ID NO: 1921 - DNA, 20 bp, Artificial Sequence
  Description of Artificial Sequence: Synthetic oligonucleotide
  Description of Combined DNA/RNA Molecule: Synthetic oligonucleotide
agcuucttgtccagctttat

SEQ ID NO: 1922 - DNA, 20 bp, Artificial Sequence
  Description of Artificial Sequence: Synthetic oligonucleotide
  Description of Combined DNA/RNA Molecule: Synthetic oligonucleotide
auagcagcttcttgtccagc

SEQ ID NO: 1923 - DNA, 20 bp, Artificial Sequence
  Description of Artificial Sequence: Synthetic oligonucleotide
cggcctctgaagctcgggca

SEQ ID NO: 1924 - DNA, 21 bp, Artificial Sequence
  Description of Artificial Sequence: Synthetic oligonucleotide
  Description of Combined DNA/RNA Molecule: Synthetic oligonucleotide
tagcuucuuguccagcuuuuu

SEQ ID NO: 1925 - DNA, 23 bp, Artificial Sequence
  Description of Artificial Sequence: Synthetic oligonucleotide
  Description of Combined DNA/RNA Molecule: Synthetic oligonucleotide
tcacugagaauacugucccuutu

SEQ ID NO: 1926 - DNA, 23 bp, Artificial Sequence
  Description of Artificial Sequence: Synthetic oligonucleotide
  Description of Combined DNA/RNA Molecule: Synthetic oligonucleotide
tcacugagaauacugucccuutu

SEQ ID NO: 1927 - DNA, 23 bp, Artificial Sequence
  Description of Artificial Sequence: Synthetic oligonucleotide
  Description of Combined DNA/RNA Molecule: Synthetic oligonucleotide
tcacugagaauacugucccuutu

SEQ ID NO: 1928 - DNA, 23 bp, Artificial Sequence
  Description of Artificial Sequence: Synthetic oligonucleotide
  Description of Combined DNA/RNA Molecule: Synthetic oligonucleotide
tcacugagaauacugucccuutu

SEQ ID NO: 1929 - DNA, 23 bp, Artificial Sequence
  Description of Artificial Sequence: Synthetic oligonucleotide
  Description of Combined DNA/RNA Molecule: Synthetic oligonucleotide
tcacugagaauacugucccuutu

SEQ ID NO: 1930 - DNA, 23 bp, Artificial Sequence
  Description of Artificial Sequence: Synthetic oligonucleotide
  Description of Combined DNA/RNA Molecule: Synthetic oligonucleotide
tcacugagaauacugucccuutu

SEQ ID NO: 1931 - DNA, 23 bp, Artificial Sequence
  Description of Artificial Sequence: Synthetic oligonucleotide
  Description of Combined DNA/RNA Molecule: Synthetic oligonucleotide
tcacugagaauacugucccuutu

SEQ ID NO: 1932 - DNA, 23 bp, Artificial Sequence
  Description of Artificial Sequence: Synthetic oligonucleotide
  Description of Combined DNA/RNA Molecule: Synthetic oligonucleotide
tcacugagaauacugucccuutu

SEQ ID NO: 1933 - DNA, 23 bp, Artificial Sequence
  Description of Artificial Sequence: Synthetic oligonucleotide
  Description of Combined DNA/RNA Molecule: Synthetic oligonucleotide
tcacugagaauacugucccuutu

SEQ ID NO: 1934 - DNA, 23 bp, Artificial Sequence
  Description of Artificial Sequence: Synthetic oligonucleotide
  Description of Combined DNA/RNA Molecule: Synthetic oligonucleotide
tcacugagaauacugucccuutu

SEQ ID NO: 1935 - DNA, 21 bp, Artificial Sequence
  Description of Artificial Sequence: Synthetic oligonucleotide
  Description of Combined DNA/RNA Molecule: Synthetic oligonucleotide
tcacugagaauacuguccctu

SEQ ID NO: 1936 - DNA, 21 bp, Artificial Sequence
  Description of Artificial Sequence: Synthetic oligonucleotide
  Description of Combined DNA/RNA Molecule: Synthetic oligonucleotide
tcacugagaauacuguccctu

SEQ ID NO: 1937 - DNA, 21 bp, Artificial Sequence
  Description of Artificial Sequence: Synthetic oligonucleotide
  Description of Combined DNA/RNA Molecule: Synthetic oligonucleotide
tcacugagaauacuguccctu

SEQ ID NO: 1938 - DNA, 21 bp, Artificial Sequence
  Description of Artificial Sequence: Synthetic oligonucleotide
  Description of Combined DNA/RNA Molecule: Synthetic oligonucleotide
tcacugagaauacuguccctu

SEQ ID NO: 1939 - DNA, 21 bp, Artificial Sequence
  Description of Artificial Sequence: Synthetic oligonucleotide
  Description of Combined DNA/RNA Molecule: Synthetic oligonucleotide
tcacugagaauacuguccctu

SEQ ID NO: 1940 - DNA, 21 bp, Artificial Sequence
  Description of Artificial Sequence: Synthetic oligonucleotide
  Description of Combined DNA/RNA Molecule: Synthetic oligonucleotide
tcacugagaauacuguccctu

SEQ ID NO: 1941 - DNA, 21 bp, Artificial Sequence
  Description of Artificial Sequence: Synthetic oligonucleotide
  Description of Combined DNA/RNA Molecule: Synthetic oligonucleotide
tcacugagaauacuguccctu

SEQ ID NO: 1942 - DNA, 21 bp, Artificial Sequence
  Description of Artificial Sequence: Synthetic oligonucleotide
  Description of Combined DNA/RNA Molecule: Synthetic oligonucleotide
tcacugagaauacuguccctu

SEQ ID NO: 1943 - DNA, 21 bp, Artificial Sequence
  Description of Artificial Sequence: Synthetic oligonucleotide
  Description of Combined DNA/RNA Molecule: Synthetic oligonucleotide
tagcuucuuguccagcuuuuu

SEQ ID NO: 1944 - DNA, 21 bp, Artificial Sequence
  Description of Artificial Sequence: Synthetic oligonucleotide
  Description of Combined DNA/RNA Molecule: Synthetic oligonucleotide
tagcuucuuguccagcuuuuu

SEQ ID NO: 1945 - DNA, 21 bp, Artificial Sequence
  Description of Artificial Sequence: Synthetic oligonucleotide
  Description of Combined DNA/RNA Molecule: Synthetic oligonucleotide
tagcuucuuguccagcuuuuu

SEQ ID NO: 1946 - DNA, 21 bp, Artificial Sequence
  Description of Artificial Sequence: Synthetic oligonucleotide
  Description of Combined DNA/RNA Molecule: Synthetic oligonucleotide
tagcuucuuguccagcuuuuu

SEQ ID NO: 1947 - RNA, 20 nt, Artificial Sequence
  Description of Artificial Sequence: Synthetic oligonucleotide
agcuucuuguccagcuuuuu

SEQ ID NO: 1948 - RNA, 20 nt, Artificial Sequence
  Description of Artificial Sequence: Synthetic oligonucleotide
agcuucuuguccagcuuuuu

SEQ ID NO: 1949 - RNA, 20 nt, Artificial Sequence
  Description of Artificial Sequence: Synthetic oligonucleotide
agcuucuuguccagcuuuuu

SEQ ID NO: 1950 - DNA, 21 bp, Artificial Sequence
  Description of Artificial Sequence: Synthetic oligonucleotide
  Description of Combined DNA/RNA Molecule: Synthetic oligonucleotide
tguccagcuuuauugggagtu

SEQ ID NO: 1951 - DNA, 22 bp, Artificial Sequence
  Description of Artificial Sequence: Synthetic oligonucleotide
  Description of Combined DNA/RNA Molecule: Synthetic oligonucleotide
guccagcuuuauugggaggctu

SEQ ID NO: 1952 - DNA, 20 bp, Artificial Sequence
  Description of Artificial Sequence: Synthetic oligonucleotide
agcttcttgtccagctttat

SEQ ID NO: 1953 - DNA, 20 bp, Artificial Sequence
  Description of Artificial Sequence: Synthetic oligonucleotide
tggtaatccactttcagagg

SEQ ID NO: 1954 - DNA, 20 bp, Artificial Sequence
  Description of Artificial Sequence: Synthetic oligonucleotide
tggtaatccactttcagagg

SEQ ID NO: 1955 - DNA, 20 bp, Artificial Sequence
  Description of Artificial Sequence: Synthetic oligonucleotide
tggtaatccactttcagagg

SEQ ID NO: 1956 - DNA, 20 bp, Artificial Sequence
  Description of Artificial Sequence: Synthetic oligonucleotide
tggtaatccactttcagagg

SEQ ID NO: 1957 - DNA, 20 bp, Artificial Sequence
  Description of Artificial Sequence: Synthetic oligonucleotide
tggtaatccactttcagagg

SEQ ID NO: 1958 - RNA, 25 nt, Artificial Sequence
  Description of Artificial Sequence: Synthetic oligonucleotide
gcuggccucccaauaaagcuggaca

SEQ ID NO: 1959 - RNA, 25 nt, Artificial Sequence
  Description of Artificial Sequence: Synthetic oligonucleotide
gcuggccucccaauaaagcuggaca
